(19) United States
(12) Patent Application Publication
(10) Pub. No.: US 2025/0127809 A1
(43) Pub. Date: Apr. 24, 2025

(54) COMPOSITIONS AND METHODS FOR THE TREATMENT OF HEMOGLOBINOPATHIES

(71) Applicant: Novartis AG, Basel (CH)

(72) Inventors: Muluken Shambel BELEW, Ontario (CA); Jennifer Stroka COBB, Stow, MA (US); Carsten RUSS, Arlington, MA (US); Frederic SIGOILLOT, Waltham, MA (US); Susan C. STEVENSON, Ashland, MA (US); Pamela YF TING, SOMERVILLE, MA (US)

(21) Appl. No.: 18/569,029

(22) PCT Filed: Jun. 22, 2022
(86) PCT No.: PCT/IB2022/055799

§ 371 Date: Dec. 11, 2023

Related U.S. Application Data
(60) Provisional application No. 63/214,070, filed on Jun. 23, 2021.

(51) Int. Cl. A61K 35/14; A61K 35/12; A61P 7/00; C12N 5/071; C12N 9/22; C12N 15/113; C12N 15/52

(52) U.S. Cl. CPC A61K 35/14; A61P 7/00; C12N 5/0602; C12N 9/22; C12N 15/113; C12N 15/52; A61K 2035/124; C12N 2510/00

(57) ABSTRACT

The present invention is directed to compositions and methods for the treatment of hemoglobinopathies.

### CROSS-REFERENCE TO RELATED APPLICATION

[0001] This application claims the benefit of and priority to the following U.S. Provisional Application No. 63/214,070, filed Jun. 23, 2021, the entire contents of which are incorporated herein by reference.

### SEQUENCE LISTING

[0002] The instant application contains a Sequence Listing, which has been submitted electronically in ASCII format and is hereby incorporated by reference in its entirety. Said ASCII copy, created on Jun. 21, 2022, is named PAT059150-WO-PCT_SL.txt and is 895,430 bytes in size.

### BACKGROUND

[0003] CRISPRs (Clustered Regularly Interspaced Short Palindromic Repeats) evolved in bacteria as an adaptive immune system to defend against viral attack. Upon exposure to a virus, short segments of viral DNA are integrated into the CRISPR locus of the bacterial genome. RNA is transcribed from a portion of the CRISPR locus that includes the viral sequence. That RNA, which contains sequence that is complimentary to the viral genome, mediates targeting of a Cas9 protein to the sequence in the viral genome. The Cas9 protein cleaves and thereby silences the viral target.

[0004] Recently, the CRISPR/Cas system has been adapted for genome editing in eukaryotic cells. The introduction of site-specific single (SSBs) or double strand breaks (DSBs) allows for target sequence alteration through, for example, non-homologous end-joining (NHEJ) or homology-directed repair (HDR).

### SUMMARY OF THE INVENTION

[0005] Without being bound by theory, the invention here is based in part on the surprising finding of the linkage between ZNF644 gene expression/protein activity and the hemoglobin F (HbF) production. As demonstrated in the examples and figures, knocking down or knocking out ZNF644 gene or ZNF644 protein in cells (by various modalities/compositions described herein) significantly increased HbF induction in those cells, thereby treating HbF-associated conditions and disorders (e.g., hemoglobinopathies, e.g., sickle cell disease and beta thalassemia). The invention is also based in part on the discovery that CRISPR systems, e.g., Cas9 CRISPR systems, e.g., as described herein, can be used to modify cells (e.g., hematopoietic stem and progenitor cells (HSPCs)), for example, at ZNF644 gene, as described herein, to increase fetal hemoglobin (HbF) expression and/or decrease expression of beta globin (e.g., a beta globin gene having a disease-causing mutation), for example in progeny, for example red blood cell progeny, of the modified cells, and that the modified cells (e.g., modified HSPCs) may be used to treat hemoglobinopathies, e.g., sickle cell disease and beta thalassemia. In one aspect, it has surprisingly been shown herein that introduction of gene editing systems, e.g., CRISPR systems, e.g., as described herein, to cells (e.g., HSPCs), that target ZNF644 gene to create modified HSPCs (e.g., HSPCs that comprise one or more indels, for example, as described herein) that are able to efficiently engraft into an organism, persist long-term in the engrafted organism, and differentiate, including into erythrocytes with increased fetal hemoglobin expression. In addition, these modified HSPCs are capable of being cultured ex vivo, for example, in the presence of a stem cell expander (for example as described herein) under conditions that cause them to expand and proliferate while maintaining stemness. When the gene editing systems, e.g., CRISPR systems, e.g., as described herein, are introduced into HPSCs derived from sickle cell disease patients, the modified cells and their progeny (e.g., erythroid progeny) surprisingly show not only upregulation of fetal hemoglobin, but also show a significant decrease in sickle beta-globin, and a significant decrease in the number of sickle cells and increase the number of normal red blood cells, relative to unmodified cell populations.

[0006] Thus, in an aspect, the invention provides CRISPR systems (e.g., Cas CRISPR systems, e.g., Cas9 CRISPR systems, e.g., S. pyogenes Cas9 CRISPR systems) comprising one or more, e.g., one, gRNA molecule as described herein. Any of the gRNA molecules described herein may be used in such systems, and in the methods and cells described herein.

[0007] In an aspect, the invention provides a gRNA molecule including a tracr and crRNA, wherein the crRNA includes a targeting domain that is complementary with a target sequence of ZNF644 gene (e.g., a human ZNF644 gene). In embodiments, the ZNF644 gene includes genomic nucleic acid sequence at Chr19:15419978-15451624, − strand, hg38, or a fragment thereof or a variant thereof. In embodiments, the targeting domain includes, e.g., consists of, any one of SEQ ID NO: 1 to SEQ ID NO: 2613 (see, e.g., Tables 1-3). In embodiments, the gRNA molecule includes a targeting domain which includes (e.g., consists of) a fragment of any of the sequences above.

[0008] In any of the aspects and embodiments described herein, the gRNA molecule may further have regions and/or properties described herein. In embodiments, the gRNA molecule includes a fragment of any of the targeting domains described herein. In embodiments, the targeting domain includes, e.g., consists of, 17, 18, 19, or 20 consecutive nucleic acids of any one of the recited targeting domain sequences. In embodiments, the 17, 18, 19, or 20 consecutive nucleic acids of any one of the recited targeting domain sequences are the 17, 18, 19, or 20 consecutive nucleic acids disposed at the 3′ end of the recited targeting domain sequence. In other embodiments, the 17, 18, 19, or 20 consecutive nucleic acids of any one of the recited targeting domain sequences are the 17, 18, 19, or 20 consecutive nucleic acids disposed at the 5′ end of the recited targeting domain sequence. In other embodiments, the 17, 18, 19, or 20 consecutive nucleic acids of any one of the recited targeting domain sequences do not include either the 5′ or 3′ nucleic acid of the recited targeting domain sequence. In embodiments, the targeting domain consists of the recited targeting domain sequence.

[0009] In an aspect, including in any of the aspects and embodiments described herein, a portion of the crRNA and a portion of the tracr hybridize to form a flagpole including SEQ ID NO: 3110 or 3111. In an aspect, including in any of the aspects and embodiments described herein, the flagpole further includes a first flagpole extension, located 3′ to the crRNA portion of the flagpole, wherein said first flagpole extension includes SEQ ID NO: 3112. In an aspect, including in any of the aspects and embodiments described herein, the flagpole further includes a second flagpole extension located 3′ to the crRNA portion of the flagpole and, if present, the first flagpole extension, wherein said second flagpole extension includes SEQ ID NO: 3113.

[0010] In an aspect, including in any of the aspects and embodiments described herein, the tracr includes SEQ ID NO: 3152 or SEQ ID NO: 3153. In an aspect, including in any of the aforementioned aspects and embodiments, the tracr includes SEQ ID NO: 3160, optionally further including, at the 3′ end, an additional 1, 2, 3, 4, 5, 6, or 7 uracil (U) nucleotides. In an aspect, including in any of the aspects and embodiments described herein, the crRNA includes, from 5′ to 3′, [targeting domain]-: a) SEQ ID NO:3110; b) SEQ ID NO: 3111; c) SEQ ID NO: 3127; d) SEQ ID NO: 3128; e) SEQ ID NO: 3129; f) SEQ ID NO: 3130; or g) SEQ ID NO: 3154.

[0011] In an aspect, including in any of the aforementioned aspects and embodiments, the tracr includes, from 5′ to 3′: a) SEQ ID NO: 3115; b) SEQ ID NO: 3116; c) SEQ ID NO: 3131; d) SEQ ID NO: 3132; e) SEQ ID NO: 3152; f) SEQ ID NO: 3153; g) SEQ ID NO: 3160; h) SEQ ID NO: 3155; i) (SEQ ID NO: 3156; j) SEQ ID NO: 3157; k) any of a) to j), above, further including, at the 3′ end, at least 1, 2, 3, 4, 5, 6 or 7 uracil (U) nucleotides, e.g., 1, 2, 3, 4, 5, 6, or 7 uracil (U) nucleotides; 1) any of a) to k), above, further including, at the 3′ end, at least 1, 2, 3, 4, 5, 6 or 7 adenine (A) nucleotides, e.g., 1, 2, 3, 4, 5, 6, or 7 adenine (A) nucleotides; or m) any of a) to 1), above, further including, at the 5′ end (e.g., at the 5′ terminus), at least 1, 2, 3, 4, 5, 6 or 7 adenine (A) nucleotides, e.g., 1, 2, 3, 4, 5, 6, or 7 adenine (A) nucleotides.

[0012] In an aspect, including in any of the aspects and embodiments described herein, the targeting domain and the tracr are disposed on separate nucleic acid molecules. In an aspect, including in any of the aspects and embodiments described herein, the targeting domain and the tracr are disposed on separate nucleic acid molecules, and the nucleic acid molecule including the targeting domain includes SEQ ID NO: 3129, optionally disposed immediately 3′ to the targeting domain, and the nucleic acid molecule including the tracr includes, e.g., consists of, SEQ ID NO: 3152. In an aspect, including in any of the aforementioned aspects and embodiments, the crRNA portion of the flagpole includes SEQ ID NO: 3129 or SEQ ID NO: 3130. In an aspect, including in any of the aforementioned aspects and embodiments, the tracr includes SEQ ID NO: 3115 or 3116, and optionally, if a first flagpole extension is present, a first tracr extension, disposed 5′ to SEQ ID NO: 3115 or 3116, said first tracr extension including SEQ ID NO: 3117.

[0013] In an aspect, including in any of the aforementioned aspects and embodiments, the targeting domain and the tracr are disposed on a single nucleic acid molecule, for example, wherein the tracr is disposed 3′ to the targeting domain. In an aspect, the gRNA molecule includes a loop, disposed 3′ to the targeting domain and 5′ to the tracr. In embodiments, the loop includes SEQ ID NO: 3114. In an aspect, including in any of the aforementioned aspects and embodiments, the gRNA molecule includes, from 5′ to 3′, [targeting domain]-: (a) SEQ ID NO: 3123; (b) SEQ ID NO: 3124; (c) SEQ ID NO: 3125; (d) SEQ ID NO: 3126; (e) SEQ ID NO: 3159; or (f) any of (a) to (e), above, further including, at the 3′ end, 1, 2, 3, 4, 5, 6 or 7 uracil (U) nucleotides.

[0014] In an aspect, including in any of the aforementioned aspects and embodiments, the targeting domain and the tracr are disposed on a single nucleic acid molecule, and wherein said nucleic acid molecule includes, e.g., consists of, said targeting domain and SEQ ID NO: 3159, optionally disposed immediately 3′ to said targeting domain.

[0015] In an aspect, including in any of the aforementioned aspects and embodiments, one, or optionally more than one, of the nucleic acid molecules including the gRNA molecule includes:
[0016] a) one or more, e.g., three, phosphorothioate modifications at the 3′ end of said nucleic acid molecule or molecules;
[0017] b) one or more, e.g., three, phosphorothioate modifications at the 5′ end of said nucleic acid molecule or molecules;
[0018] c) one or more, e.g., three, 2′-O-methyl modifications at the 3′ end of said nucleic acid molecule or molecules;
[0019] d) one or more, e.g., three, 2′-O-methyl modifications at the 5′ end of said nucleic acid molecule or molecules;
[0020] e) a 2′ O-methyl modification at each of the 4^{th}-to-terminal, 3^{rd}-to-terminal, and 2^{nd}-to-terminal 3′ residues of said nucleic acid molecule or molecules;
[0021] f) a 2′ O-methyl modification at each of the 4^{th}-to-terminal, 3^{rd}-to-terminal, and 2^{nd}-to-terminal 5′ residues of said nucleic acid molecule or molecules; or
[0022] f) any combination thereof.

[0023] In an aspect, including in any of the aforementioned aspects and embodiments the invention provides a gRNA molecule, wherein: when a CRISPR system (e.g., an RNP as described herein) including the gRNA molecule is introduced into a cell, an indel is formed at or near the target sequence complementary to the targeting domain of the gRNA molecule.

[0024] In an aspect, including in any of the aforementioned aspects and embodiments, the invention provides a gRNA molecule, wherein when a CRISPR system (e.g., an RNP as described herein) including the gRNA molecule is introduced into a population of cells, an indel is formed at or near the target sequence complementary to the targeting domain of the gRNA molecule in at least about 15%, e.g., at least about 17%, e.g., at least about 20%, e.g., at least about 30%, e.g., at least about 40%, e.g., at least about 50%, e.g., at least about 55%, e.g., at least about 60%, e.g., at least about 70%, e.g., at least about 75%, of the cells of the population. In an aspect, including in any of the aforementioned aspects and embodiments, the indel includes at least one nucleotide of a ZNF644 gene region. In embodiments, at least about 15% of the cells of the population include an indel which includes at least one nucleotide of a ZNF644 gene region. In embodiments, the indel is as measured by next generation sequencing (NGS).

[0025] In an aspect, including in any of the aforementioned aspects and embodiments, the invention provides a gRNA molecule, wherein when a CRISPR system (e.g., an RNP as described herein) including the gRNA molecule is introduced into a cell, expression of fetal hemoglobin is increased in said cell or its progeny, e.g., its erythroid progeny, e.g., its red blood cell progeny. In embodiments, when a CRISPR system (e.g., an RNP as described herein) including the gRNA molecule is introduced into a population of cells, the percentage of F cells in said population or population of its progeny, e.g., its erythroid progeny, e.g., its red blood cell progeny, is increased by at least about 15%, e.g., at least about 17%, e.g., at least about 20%, e.g., at least about 25%, e.g., at least about 30%, e.g., at least about 35%, e.g., at least about 40%, relative to the percentage of F cells in a population of cells to which the gRNA molecule was not introduced or a population of its progeny, e.g., its erythroid progeny, e.g., its red blood cell progeny. In embodiments, said cell or its progeny, e.g., its erythroid progeny, e.g., its red blood cell progeny, produces at least about 6 picograms (e.g., at least about 7 picograms, at least about 8 picograms, at least about 9 picograms, at least about 10 picograms, or from about 8 to about 9 picograms, or from about 9 to about 10 picograms) fetal hemoglobin per cell.

[0026] In an aspect, including in any of the aforementioned aspects and embodiments, the invention provides a gRNA molecule, wherein when a CRISPR system (e.g., an RNP as described herein) including the gRNA molecule is introduced into a cell, no off-target indels are formed in said cell, e.g., no off-target indels are formed outside of the ZNF644 gene region (e.g., within a gene, e.g., a coding region of a gene), e.g., as detectible by next generation sequencing and/or a nucleotide insertional assay. In an aspect, including in any of the aforementioned aspects and embodiments, the invention provides a gRNA molecule, wherein when a CRISPR system (e.g., an RNP as described herein) including the gRNA molecule is introduced into a population of cells, no off-target indel, e.g., no off-target indel outside of the ZNF644 gene (e.g., within a gene, e.g., a coding region of a gene), is detected in more than about 5%, e.g., more than about 1%, e.g., more than about 0.1%, e.g., more than about 0.01%, of the cells of the population of cells, e.g., as detectible by next generation sequencing and/or a nucleotide insertional assay.

[0027] In an aspect, including of any of the aforementioned aspects and embodiments, the cell is (or population of cells includes) a mammalian, primate, or human cell, e.g., is a human cell, e.g., the cell is (or population of cells includes) an HSPC, e.g., the HSPC is CD34+, e.g., the HSPC is CD34+CD90+. In embodiments, the cell is autologous with respect to a patient to be administered said cell. In other embodiments, the cell is allogeneic with respect to a patient to be administered said cell.

[0028] In an aspect, the gRNA molecules, genome editing systems (e.g., CRISPR systems), and/or methods described herein relate to cells, e.g., as described herein, that include or result in one or more of the following properties:
[0029] (a) at least about 40%, at least about 50%, at least about 60%, at least about 70%, at least about 80%, at least about 90%, at least about 95%, at least about 96%, at least about 97%, at least about 98% or at least about 99% of the cells of a population of cells described herein comprise an indel at or near a genomic DNA sequence complementary to the targeting domain of a gRNA molecule described herein;
[0030] (b) a cell (e.g., population of cells) described herein is capable of differentiating into a differentiated cell of an erythroid lineage (e.g., a red blood cell), and wherein said differentiated cell exhibits an increased level of fetal hemoglobin, e.g., relative to an unaltered cell (e.g., population of cells);
[0031] (c) a population of cells described herein is capable of differentiating into a population of differentiated cells, e.g., a population of cells of an erythroid lineage (e.g., a population of red blood cells), and wherein said population of differentiated cells has an increased percentage of F cells (e.g., at least about 15%, at least about 20%, at least about 25%, at least about 30%, or at least about 40% higher percentage of F cells) e.g., relative to a population of unaltered cells;
[0032] (d) a cell (e.g., population of cells) described herein is capable of differentiating into a differentiated cell, e.g., a cell of an erythroid lineage (e.g., a red blood cell), and wherein said differentiated cell (e.g., population of differentiated cells) produces at least about 6 picograms (e.g., at least about 7 picograms, at least about 8 picograms, at least about 9 picograms, at least about 10 picograms, or from about 8 to about 9 picograms, or from about 9 to about 10 picograms) fetal hemoglobin per cell;
[0033] (e) no off-target indels are formed in a cell described herein, e.g., no off-target indels are formed outside of the ZNF644 gene region (e.g., within a gene, e.g., a coding region of a gene), e.g., as detectible by next generation sequencing and/or a nucleotide insertional assay;
[0034] (f) no off-target indel, e.g., no off-target indel outside of the ZNF644 gene region (e.g., within a gene, e.g., a coding region of a gene), is detected in more than about 5%, e.g., more than about 1%, e.g., more than about 0.1%, e.g., more than about 0.01%, of the cells of a population of cells described herein, e.g., as detectible by next generation sequencing and/or a nucleotide insertional assay;
[0035] (g) a cell described herein or its progeny is detectable, e.g., detectable in the bone marrow or detectable in the peripheral blood, in a patient to which it is transplanted at more than 16 weeks, more than 20 weeks or more than 24 weeks after transplantation, optionally as detected by detecting an indel at or near a genomic DNA sequence complementary to the targeting domain of a gRNA molecule of any of SEQ ID NO: 1 to SEQ ID NO: 2613, optionally wherein the indel is a large deletion indel;
[0036] (h) a population of cells described herein is capable of differentiating into a population of differentiated cells, e.g., a population of cells of an erythroid lineage (e.g., a population of red blood cells), and wherein said population of differentiated cells includes a reduced percentage of sickle cells (e.g., at least about 15%, at least about 20%, at least about 25%, at least about 30%, at least about 40%, at least about 50%, at least about 60%, at least about 70%, at least about 80%, or at least about 90% lower percentage of sickle cells) e.g., relative to a population of unaltered cells; and/or
[0037] (i) a cell or population of cells described herein is capable of differentiating into a population of differentiated cells, e.g., a population of cells of an erythroid lineage (e.g., a population of red blood cells), and wherein said population of differentiated cells includes cells which produce a reduced level (e.g., at least about 15%, at least about 20%, at least about 25%, at least about 30%, at least about 40%, at least about 50%, at least about 60%, at least about 70%, at least about 80%, or at least about 90% lower level) of sickle hemoglobin (HbS), e.g., relative to a population of unaltered cells.

[0038] In an aspect, the invention provides a composition including:
[0039] 1) one or more gRNA molecules (including a first gRNA molecule) described herein, e.g., of any of the aforementioned gRNA aspects and embodiments, and a Cas9 molecule, e.g., described herein;
[0040] 2) one or more gRNA molecules (including a first gRNA molecule) described herein, e.g., of any of the aforementioned gRNA aspects and embodiments, and nucleic acid comprising a nucleotide sequence encoding a Cas9 molecule, e.g., described herein;
[0041] 3) nucleic acid comprising one or more nucleotide sequences each encoding one gRNA molecule (including a first gRNA molecule) described herein, e.g., of any of the aforementioned gRNA aspects and embodiments, and a Cas9 molecule, e.g., described herein;
[0042] 4) nucleic acid comprising one or more nucleotide sequences each encoding one gRNA molecule (including a first gRNA molecule) described herein, e.g., of any of the aforementioned gRNA aspects and embodiments, and nucleic acid encoding a Cas9 molecule, e.g., described herein; or 5) any of 1) to 4), above, and a template nucleic acid; or
[0043] 6) any of 1) to 4) above, and nucleic acid including a nucleotide sequence encoding a template nucleic acid.

[0044] In an aspect, the invention provides a composition including a first gRNA molecule described herein, e.g., of any of the aforementioned gRNA aspects and embodiments, further including a Cas9 molecule, e.g., described herein, e.g., wherein the Cas9 molecule is an active or inactive s. pyogenes Cas9, for example, wherein the Cas9 molecule includes SEQ ID NO: 3133. In aspects, the Cas9 molecule includes, e.g., consists of: (a) SEQ ID NO: 3161; (b) SEQ ID NO: 3162; (c) SEQ ID NO: 3163; (d) SEQ ID NO: 3164; (e) SEQ ID NO: 3165; (f) SEQ ID NO: 3166; (g) SEQ ID NO: 3167; (h) SEQ ID NO: 3168; (i) SEQ ID NO: 3169; (j) SEQ ID NO: 3170; (k) SEQ ID NO: 3171 or (1) SEQ ID NO: 3172.

[0045] In an aspect, including in any of the aforementioned composition aspects and embodiments, the first gRNA molecule and Cas9 molecule are present in a ribonuclear protein complex (RNP).

[0046] In an aspect, including in any of the aforementioned composition aspects and embodiments, the invention provides a composition further including a second gRNA molecule; a second gRNA molecule and a third gRNA molecule; or a second gRNA molecule, optionally, a third gRNA molecule, and, optionally, a fourth gRNA molecule, wherein the second gRNA molecule, the optional third gRNA molecule, and the optional fourth gRNA molecule are a gRNA molecule described herein, e.g., are a gRNA molecule of any of the aforementioned gRNA molecule aspects and embodiments, and wherein each gRNA molecule of the composition is complementary to a different target sequence. In embodiments, two or more of the first gRNA molecule, the second gRNA molecule, the optional third gRNA molecule, and the optional fourth gRNA molecule are complementary to target sequences within the same gene or region. In embodiments, the first gRNA molecule, the second gRNA molecule, the optional third gRNA molecule, and the optional fourth gRNA molecule are complementary to target sequences not more than 6000 nucleotides, not more than 5000 nucleotides, not more than 500, not more than 400 nucleotides, not more than 300, not more than 200 nucleotides, not more than 100 nucleotides, not more than 90 nucleotides, not more than 80 nucleotides, not more than 70 nucleotides, not more than 60 nucleotides, not more than 50 nucleotides, not more than 40 nucleotides, not more than 30 nucleotides, not more than 20 nucleotides or not more than 10 nucleotides apart. In an aspect, including in any of the aforementioned composition aspects and embodiments, the composition includes (e.g., consists of) a first gRNA molecule and a second gRNA molecule, wherein the first gRNA molecule and second gRNA molecule are: (a) independently selected and are complementary to different target sequences; (b) independently selected from the gRNA molecules of Table 1, and are complementary to different target sequences; c) independently selected from the gRNA molecules of Table 2, and are complementary to different target sequences; or (d) independently selected from the gRNA molecules of Table 3 and are complementary to different target sequences, or (f) independently selected from the gRNA molecules of any of the aforementioned aspects and embodiments, and are complementary to different target sequences.

[0047] In an aspect, including in any of the aforementioned composition aspects and embodiments, the composition includes a first gRNA molecule and a second gRNA molecule, wherein:
[0048] a) the first gRNA molecule is complementary to a target sequence including at least 1 nucleotide (e.g., including 20 consecutive nucleotides) within: Chr19:15419978-15451624, − strand, hg38;
[0049] b) the second gRNA molecule is complementary to a target sequence including at least 1 nucleotide (e.g., comprising 20 consecutive nucleotides) within: Chr19:15419978-15451624, − strand, hg38.

[0050] In an aspect, with respect to the gRNA molecule components of the composition, the composition consists of a first gRNA molecule and a second gRNA molecule.

[0051] In an aspect, including in any of the aforementioned composition aspects and embodiments, each of said gRNA molecules is in a ribonuclear protein complex (RNP) with a Cas9 molecule, e.g., described herein.

[0052] In an aspect, including in any of the aforementioned composition aspects and embodiments, the composition includes a template nucleic acid, wherein the template nucleic acid includes a nucleotide that corresponds to a nucleotide at or near the target sequence of the first gRNA molecule. In embodiments, the template nucleic acid includes nucleic acid encoding: human ZNF644 gene, or fragment thereof.

[0053] In an aspect, including in any of the aforementioned composition aspects and embodiments, the composition is formulated in a medium suitable for electroporation.

[0054] In an aspect, including in any of the aforementioned composition aspects and embodiments, each of said gRNA molecules of said composition is in a RNP with a Cas9 molecule described herein, and wherein each of said RNP is at a concentration of less than about 10 uM, e.g., less than about 3 uM, e.g., less than about 1 uM, e.g., less than about 0.5 uM, e.g., less than about 0.3 uM, e.g., less than about 0.1 uM. In embodiments, the RNP is at a concentration of about 1 uM. In embodiments, the RNP is at a concentration of about 2 uM. In embodiments, said concentration is the concentration of RNP in a composition comprising the cells, e.g., as described herein, optionally wherein the composition comprising the cells and the RNP is suitable for electroporation.

[0055] In an aspect, the invention provides a nucleic acid sequence that encodes one or more gRNA molecules described herein, e.g., of any of the aforementioned gRNA molecule aspects and embodiments. In embodiments, the nucleic acid includes a promoter operably linked to the sequence that encodes the one or more gRNA molecules, for example, the promoter is a promoter recognized by an RNA polymerase II or RNA polymerase III, or, for example, the promoter is a U6 promoter or an HI promoter.

[0056] In an aspect, including in any of the aforementioned nucleic acid aspects and embodiments, the nucleic acid further encodes a Cas9 molecule, for example, a Cas9 molecule that includes, e.g., consists of, any of SEQ ID NO: 3133, (a) SEQ ID NO: 3161; (b) SEQ ID NO: 3162; (c) SEQ ID NO: 3163; (d) SEQ ID NO: 3164; (e) SEQ ID NO: 3165; (f) SEQ ID NO: 3166; (g) SEQ ID NO: 3167; (h) SEQ ID NO: 3168; (i) SEQ ID NO: 3169; (j) SEQ ID NO: 3170; (k) SEQ ID NO: 3171 or (1) SEQ ID NO: 3172. In embodiments, said nucleic acid includes a promoter operably linked to the sequence that encodes a Cas9 molecule, for example, an EF-1 promoter, a CMV IE gene promoter, an EF-1a promoter, an ubiquitin C promoter, or a phosphoglycerate kinase (PGK) promoter.

[0057] In an aspect, provided herein includes a vector including the nucleic acid of any of the aforementioned nucleic acid aspects and embodiments. In embodiments, the vector is selected from the group consisting of a lentiviral vector, an adenoviral vector, an adeno-associated viral (AAV) vector, a herpes simplex virus (HSV) vector, a plasmid, a minicircle, a nanoplasmid, and an RNA vector.

[0058] In an aspect, provided herein includes a method of altering a cell (e.g., a population of cells), (e.g., altering the structure (e.g., sequence) of nucleic acid) at or near a target sequence within said cell, including contacting (e.g., introducing into) said cell (e.g., population of cells) with:
[0059] 1) one or more gRNA molecules described herein (e.g., of any of the aforementioned gRNA molecule aspects and embodiments) and a Cas9 molecule, e.g., described herein;
[0060] 2) one or more gRNA molecules described herein (e.g., of any of the aforementioned gRNA molecule aspects and embodiments) and nucleic acid comprising a nucleotide sequence encoding a Cas9 molecule, e.g., described herein;
[0061] 3) nucleic acid comprising one or more nucleotide sequences each encoding one gRNA molecule described herein (e.g., of any of the aforementioned gRNA molecule aspects and embodiments) and a Cas9 molecule, e.g., described herein;
[0062] 4) nucleic acid comprising one or more nucleotide sequences each encoding one gRNA molecule described herein (e.g., of any of the aforementioned gRNA molecule aspects and embodiments) and nucleic acid comprising a nucleotide sequence encoding a Cas9 molecule, e.g., described herein;
[0063] 5) any of 1) to 4), above, and a template nucleic acid;
[0064] 6) any of 1) to 4) above, and nucleic acid including a nucleotide sequence encoding a template nucleic acid;
[0065] 7) a composition described herein, e.g., a composition of any of the aforementioned composition aspects and embodiments; or
[0066] 8) a vector described herein, e.g., a vector of any of the aforementioned vector aspects and embodiments.

[0067] In an aspect, including in any of the aforementioned method aspects and embodiments, the gRNA molecule or nucleic acid encoding the gRNA molecule, and the Cas9 molecule or nucleic acid encoding the Cas9 molecule, are formulated in a single composition. In another aspect, the gRNA molecule or nucleic acid encoding the gRNA molecule, and the Cas9 molecule or nucleic acid encoding the Cas9 molecule, are formulated in more than one composition. In an aspect, the more than one composition are delivered simultaneously or sequentially.

[0068] In an aspect of the methods described herein, including in any of the aforementioned method aspects and embodiments, the cell is an animal cell, for example, the cell is a mammalian, primate, or human cell, for example, the cell is a hematopoietic stem or progenitor cell (HSPC) (e.g., a population of HSPCs), for example, the cell is a CD34+ cell, for example, the cell is a CD34+CD90+ cell. In embodiments of the methods described herein, the cell is disposed in a composition including a population of cells that has been enriched for CD34+ cells. In embodiments of the methods described herein, the cell (e.g. population of cells) has been isolated from bone marrow, mobilized peripheral blood, or umbilical cord blood. In embodiments of the methods described herein, the cell is autologous or allogeneic, e.g., autologous, with respect to a patient to be administered said cell.

[0069] In an aspect of the methods described herein, including in any of the aforementioned method aspects and embodiments, a) the altering results in an indel at or near a genomic DNA sequence complementary to the targeting domain of the one or more gRNA molecules; or b) the altering results in a deletion including sequence, e.g., substantially all the sequence, complementary to the targeting domain of the one or more gRNA molecules (e.g., at least 90% complementary to the gRNA targeting domain, e.g., fully complementary to the gRNA targeting domain) in the ZNF644 gene region. In aspects of the method, the indel is an insertion or deletion of less than about 40 nucleotides, e.g., less than 30 nucleotides, e.g., less than 20 nucleotides, e.g., less than 10 nucleotides, for example, is a single nucleotide deletion.

[0070] In an aspect of the methods described herein, including in any of the aforementioned method aspects and embodiments, the method results in a population of cells wherein at least about 15%, e.g., at least about 17%, e.g., at least about 20%, e.g., at least about 30%, e.g., at least about 40%, e.g., at least about 50%, e.g., at least about 55%, e.g., at least about 60%, e.g., at least about 70%, e.g., at least about 75% of the population have been altered, e.g., include an indel.

[0071] In an aspect of the methods described herein, including in any of the aforementioned method aspects and embodiments, the altering results in a cell (e.g., population of cells) that is capable of differentiating into a differentiated cell of an erythroid lineage (e.g., a red blood cell), and wherein said differentiated cell exhibits an increased level of fetal hemoglobin, e.g., relative to an unaltered cell (e.g., population of cells).

[0072] In an aspect of the methods described herein, including in any of the aforementioned method aspects and embodiments, the altering results in a population of cells that is capable of differentiating into a population of differentiated cells, e.g., a population of cells of an erythroid lineage (e.g., a population of red blood cells), and wherein said population of differentiated cells has an increased percentage of F cells (e.g., at least about 15%, at least about 20%, at least about 25%, at least about 30%, or at least about 40% higher percentage of F cells) e.g., relative to a population of unaltered cells. In an aspect of the methods described herein, including in any of the aforementioned method aspects and embodiments, the altering results in a cell that is capable of differentiating into a differentiated cell, e.g., a cell of an erythroid lineage (e.g., a red blood cell), and wherein said differentiated cell produces at least about 6 picograms (e.g., at least about 7 picograms, at least about 8 picograms, at least about 9 picograms, at least about 10 picograms, or from about 8 to about 9 picograms, or from about 9 to about 10 picograms) fetal hemoglobin per cell.

[0073] In an aspect, the invention provides a cell, altered by a method described herein, for example, a method of any of the aforementioned method aspects and embodiments.

[0074] In an aspect, the invention provides a cell, obtainable by a method described herein, for example, a method of any of the aforementioned method aspects and embodiments.

[0075] In an aspect, the invention provides a cell, including a first gRNA molecule described herein, e.g., of any of the aforementioned gRNA molecule aspects or embodiments, or a composition described herein, e.g., of any of the aforementioned composition aspects or embodiments, a nucleic acid described herein, e.g., of any of the aforementioned nucleic acid aspects or embodiments, or a vector described herein, e.g., of any of the aforementioned vector aspects or embodiments.

[0076] In an aspect of the cell described herein, including in any of the aforementioned cell aspects and embodiments, the cell further includes a Cas9 molecule, e.g., described herein, e.g., a Cas9 molecule that includes any one of SEQ ID NO: 3133, (a) SEQ ID NO: 3161; (b) SEQ ID NO: 3162; (c) SEQ ID NO: 3163; (d) SEQ ID NO: 3164; (e) SEQ ID NO: 3165; (f) SEQ ID NO: 3166; (g) SEQ ID NO: 3167; (h) SEQ ID NO: 3168; (i) SEQ ID NO: 3169; j) SEQ ID NO: 3170; (k) SEQ ID NO: 3171 or (1) SEQ ID NO: 3172.

[0077] In an aspect of the cell described herein, including in any of the aforementioned cell aspects and embodiments, the cell includes, has included, or will include a second gRNA molecule described herein, e.g., of any of the aforementioned gRNA molecule aspects or embodiments, or nucleic acid encoding said gRNA molecule, wherein the first gRNA molecule and second gRNA molecule include nonidentical targeting domains.

[0078] In an aspect of the cell described herein, including in any of the aforementioned cell aspects and embodiments, expression of fetal hemoglobin is increased in said cell or its progeny (e.g., its erythroid progeny, e.g., its red blood cell progeny) relative to a cell or its progeny of the same cell type that has not been modified to include a gRNA molecule.

[0079] In an aspect of the cell described herein, including in any of the aforementioned cell aspects and embodiments, the cell is capable of differentiating into a differentiated cell, e.g., a cell of an erythroid lineage (e.g., a red blood cell), and wherein said differentiated cell exhibits an increased level of fetal hemoglobin, e.g., relative to a cell of the same type that has not been modified to include a gRNA molecule.

[0080] In an aspect of the cell described herein, including in any of the aforementioned cell aspects and embodiments, the differentiated cell (e.g., cell of an erythroid lineage, e.g., red blood cell) produces at least about 6 picograms (e.g., at least about 7 picograms, at least about 8 picograms, at least about 9 picograms, at least about 10 picograms, or from about 8 to about 9 picograms, or from about 9 to about 10 picograms) fetal hemoglobin, e.g., relative to a differentiated cell of the same type that has not been modified to include a gRNA molecule.

[0081] In an aspect of the cell described herein, including in any of the aforementioned cell aspects and embodiments, the cell has been contacted, e.g., contacted ex vivo, with a stem cell expander, for example, a stem cell expander selected from: a) (1r,4r)-N¹-(2-benzyl-7-(2-methyl-2H-tetrazol-5-yl)-9H-pyrimido[4,5-b]indol-4-yl)cyclohexane-1,4-diamine; b) methyl 4-(3-piperidin-1-ylpropylamino)-9H-pyrimido[4,5-b]indole-7-carboxylate; c) 4-(2-(2-(benzo[b]thiophen-3-yl)-9-isopropyl-9H-purin-6-ylamino)ethyl)phenol; d) (S)-2-(6-(2-(1H-indol-3-yl)ethylamino)-2-(5-fluoropyridin-3-yl)-9H-purin-9-yl)propan-1-ol; or e) combinations thereof (e.g., a combination of (1r,4r)-N¹-(2-benzyl-7-(2-methyl-2H-tetrazol-5-yl)-9H-pyrimido[4,5-b]indol-4-yl)cyclohexane-1,4-diamine and (S)-2-(6-(2-(1H-indol-3-yl)ethylamino)-2-(5-fluoropyridin-3-yl)-9H-purin-9-yl)propan-1-ol). In embodiments, the stem cell expander is (S)-2-(6-(2-(1H-indol-3-yl)ethylamino)-2-(5-fluoropyridin-3-yl)-9H-purin-9-yl)propan-1-ol.

[0082] In an aspect of the cell described herein, including in any of the aforementioned cell aspects and embodiments, the cell includes: a) an indel at or near a genomic DNA sequence complementary to the targeting domain of a gRNA molecule described herein, e.g., of any of the aforementioned gRNA molecule aspects or embodiments; or b) a deletion including sequence, e.g., substantially all the sequence, complementary to the targeting domain of a gRNA molecule described herein, e.g., of any of the aforementioned gRNA molecule aspects or embodiments (e.g., at least 90% complementary to the gRNA targeting domain, e.g., fully complementary to the gRNA targeting domain) in the ZNF644 gene region. In an aspect, the indel is an insertion or deletion of less than about 40 nucleotides, e.g., less than 30 nucleotides, e.g., less than 20 nucleotides, e.g., less than 10 nucleotides, for example, the indel is a single nucleotide deletion.

[0083] In an aspect of the cell described herein, including in any of the aforementioned cell aspects and embodiments, the cell is an animal cell, for example, the cell is a mammalian, a primate, or a human cell. In an aspect, the cell is a hematopoietic stem or progenitor cell (HSPC) (e.g., a population of HSPCs), e.g., the cell is a CD34+ cell, e.g., the cell is a CD34+CD90+ cell. In embodiments, the cell (e.g. population of cells) has been isolated from bone marrow, mobilized peripheral blood, or umbilical cord blood. In embodiments, the cell is autologous with respect to a patient to be administered said cell. In embodiments, the cell the cell is allogeneic with respect to a patient to be administered said cell. In an aspect, the invention provides a population of cells described herein, e.g., a population of cells that include a cell described herein, e.g., a cell of any of the aforementioned cell aspects and embodiments. In aspects, the invention provides a population of cells, wherein at least about 50%, e.g., at least about 60%, e.g., at least about 70%, e.g., at least about 80%, e.g., at least about 90% (e.g., at least about 95%, at least about 96%, at least about 97%, at least about 98%, or at least about 99%) of the cells of the population are a cell described herein, e.g., a cell of any of the aforementioned cell aspects and embodiments. In aspects, the population of cells (e.g., a cell of the population of cells) is capable of differentiating into a population of differentiated cells, e.g., a population of cells of an erythroid lineage (e.g., a population of red blood cells), and wherein said population of differentiated cells has an increased percentage of F cells (e.g., at least about 15%, at least about 17%, at least about 20%, at least about 25%, at least about 30%, or at least about 40% higher percentage of F cells) e.g., relative to a population of unmodified cells of the same type. In aspects, the F cells of the population of differentiated cells produce an average of at least about 6 picograms (e.g., at least about 7 picograms, at least about 8 picograms, at least about 9 picograms, at least about 10 picograms, or from about 8 to about 9 picograms, or from about 9 to about 10 picograms) fetal hemoglobin per cell.

[0084] In an aspect, including in any of the aforementioned population of cell aspects and embodiments, the invention provides population of cells, including: 1) at least 1e6 CD34+ cells/kg body weight of the patient to whom the cells are to be administered; 2) at least 2e6 CD34+ cells/kg body weight of the patient to whom the cells are to be administered; 3) at least 3e6 CD34+ cells/kg body weight of the patient to whom the cells are to be administered; 4) at least 4e6 CD34+ cells/kg body weight of the patient to whom the cells are to be administered; or 5) from 2e6 to 10e6 CD34+ cells/kg body weight of the patient to whom the cells are to be administered. In embodiments, at least about 40%, e.g., at least about 50%, (e.g., at least about 60%, at least about 70%, at least about 80%, or at least about 90%) of the cells of the population are CD34+ cells. In embodiments, at least about 5%, e.g., at least about 10%, e.g., at least about 15%, e.g., at least about 20%, e.g., at least about 30% of the cells of the population are CD34+CD90+ cells. In embodiments, the population of cells is derived from umbilical cord blood, peripheral blood (e.g., mobilized peripheral blood), or bone marrow, e.g., is derived from bone marrow. In embodiments, the population of cells includes, e.g., consists of, mammalian cells, e.g., human cells. In embodiments, the population of cells is autologous relative to a patient to which it is to be administered. In other embodiments, the population of cells is allogeneic relative to a patient to which it is to be administered.

[0085] In an aspect, the invention provides a composition including a cell described herein, e.g., a cell of any of the aforementioned cell aspects and embodiments, or a population of cells described herein, e.g., a population of cells of any of the aforementioned population of cell aspects and embodiments. In an aspect, the composition includes a pharmaceutically acceptable medium, e.g., a pharmaceutically acceptable medium suitable for cryopreservation.

[0086] In an aspect, the invention provides a method of treating a hemoglobinopathy, including administering to a patient a cell described herein, e.g., a cell of any of the aforementioned cell aspects and embodiments, a population of cells described herein, e.g., a population of cells of any of the aforementioned population of cell aspects and embodiments, or a composition described herein, e.g., a composition of any of the aforementioned composition aspects and embodiments.

[0087] In an aspect, the invention provides a method of increasing fetal hemoglobin expression in a mammal, including administering to a patient a cell described herein, e.g., a cell of any of the aforementioned cell aspects and embodiments, a population of cells described herein, e.g., a population of cells of any of the aforementioned population of cell aspects and embodiments, or a composition described herein, e.g., a composition of any of the aforementioned composition aspects and embodiments. In aspects, the hemoglobinopathy is beta-thalassemia. In aspects, the hemoglobinopathy is sickle cell disease.

[0088] In an aspect, the invention provides a method of preparing a cell (e.g., a population of cells) including:
[0089] (a) providing a cell (e.g., a population of cells) (e.g., a HSPC (e.g., a population of HSPCs));
[0090] (b) culturing said cell (e.g., said population of cells) ex vivo in a cell culture medium including a stem cell expander; and
[0091] (c) introducing into said cell a first gRNA molecule, e.g., described herein, e.g., a first gRNA molecule of any of the aforementioned gRNA molecule aspects and embodiments; a nucleic acid molecule encoding a first gRNA molecule; a composition described herein, e.g., a composition of any of the aforementioned composition aspects and embodiments; or a vector described herein, e.g., a vector of any of the aforementioned aspects and embodiments. In aspects of the method, after said introducing of step (c), said cell (e.g., population of cells) is capable of differentiating into a differentiated cell (e.g., population of differentiated cells), e.g., a cell of an erythroid lineage (e.g., population of cells of an erythroid lineage), e.g., a red blood cell (e.g., a population of red blood cells), and wherein said differentiated cell (e.g., population of differentiated cells) produces increased fetal hemoglobin, e.g., relative to the same cell which has not been subjected to step (c). In aspects of the method, the stem cell expander is: a) (1r,4r)-N1-(2-benzyl-7-(2-methyl-2H-tetrazol-5-yl)-9H-pyrimido[4,5-b]indol-4-yl)cyclohexane-1,4-diamine; b) methyl 4-(3-piperidin-1-ylpropylamino)-9H-pyrimido[4,5-b]indole-7-carboxylate; c) 4-(2-(2-(benzo[b]thiophen-3-yl)-9-isopropyl-9H-purin-6-ylamino)ethyl)phenol; d) (S)-2-(6-(2-(1H-indol-3-yl)ethylamino)-2-(5-fluoropyridin-3-yl)-9H-purin-9-yl)propan-1-ol; or e) combinations thereof (e.g., a combination of (1r,4r)-N1-(2-benzyl-7-(2-methyl-2H-tetrazol-5-yl)-9H-pyrimido[4,5-b]indol-4-yl)cyclohexane-1,4-diamine and (S)-2-(6-(2-(1H-indol-3-yl)ethylamino)-2-(5-fluoropyridin-3-yl)-9H-purin-9-yl)propan-1-ol). In embodiments, the stem cell expander is (S)-2-(6-(2-(1H-indol-3-yl)ethylamino)-2-(5-fluoropyridin-3-yl)-9H-purin-9-yl)propan-1-ol. In aspects, the cell culture medium includes thrombopoietin (Tpo), Flt3 ligand (Flt-3L), and human stem cell factor (SCF). In aspects, the cell culture medium further includes human interleukin-6 (IL-6). In aspects, the cell culture medium includes thrombopoietin (Tpo), Flt3 ligand (Flt-3L), and human stem cell factor (SCF) each at a concentration ranging from about 10 ng/mL to about 1000 ng/mL, for example, each at a concentration of about 50 ng/mL, for example, each at a concentration of 50 ng/mL. In aspects, the cell culture medium includes human interleukin-6 (IL-6) at a concentration ranging from about 10 ng/mL to about 1000 ng/mL, for example, at a concentration of about 50 ng/mL, for example, at a concentration of 50 ng/mL. In aspects, the cell culture medium includes a stem cell expander at a concentration ranging from about 1 nM to about 1 mM, for example, at a concentration ranging from about 1 μM to about 100 nM, for example, at a concentration ranging from about 500 nM to about 750 nM. In aspects, the cell culture medium includes a stem cell expander at a concentration of about 500 nM, e.g., at a concentration of 500 nM. In aspects, the cell culture medium includes a stem cell expander at a concentration of about 750 nM, e.g., at a concentration of 750 nM.

[0092] In aspects of the method of preparing a cell (e.g., a population of cells), the culturing of step (b) includes a period of culturing before the introducing of step (c), for example, the period of culturing before the introducing of step (c) is at least 12 hours, e.g., is for a period of about 1 day to about 12 days, e.g., is for a period of about 1 day to about 6 days, e.g., is for a period of about 1 day to about 3 days, e.g., is for a period of about 1 day to about 2 days, e.g., is for a period of about 2 days. In aspects of the method of preparing a cell (e.g., a population of cells), including in any of the aforementioned aspects and embodiments of the method, the culturing of step (b) includes a period of culturing after the introducing of step (c), for example, the period of culturing after the introducing of step (c) is at least 12 hours, e.g., is for a period of about 1 day to about 12 days, e.g., is for a period of about 1 day to about 6 days, e.g., is for a period of about 2 days to about 4 days, e.g., is for a period of about 2 days or is for a period of about 3 days or is for a period of about 4 days. In aspects of the method of preparing a cell (e.g., a population of cells), including in any of the aforementioned aspects and embodiments of the method, the population of cells is expanded at least 4-fold, e.g., at least 5-fold, e.g., at least 10-fold, e.g., relative to cells which are not cultured according to step (b).

[0093] In aspects of the method of preparing a cell (e.g., a population of cells), including in any of the aforementioned aspects and embodiments of the method, the introducing of step (c) includes an electroporation. In aspects, the electroporation includes 1 to 5 pulses, e.g., 1 pulse, and wherein each pulse is at a pulse voltage ranging from 700 volts to 2000 volts and has a pulse duration ranging from 10 ms to 100 ms. In aspects, the electroporation includes, e.g., consists of, 1 pulse. In aspects, the pulse (or more than one pulse) voltage ranges from 1500 to 1900 volts, e.g., is 1700 volts. In aspects, the pulse duration of the one pulse or more than one pulse ranges from 10 ms to 40 ms, e.g., is 20 ms. In aspects of the method of preparing a cell (e.g., a population of cells), including in any of the aforementioned aspects and embodiments of the method, the cell (e.g., population of cells) provided in step (a) is a human cell (e.g., a population of human cells). In aspects of the method of preparing a cell (e.g., a population of cells), including in any of the aforementioned aspects and embodiments of the method, the cell (e.g., population of cells) provided in step (a) is isolated from bone marrow, peripheral blood (e.g., mobilized peripheral blood) or umbilical cord blood. In aspects of the method of preparing a cell (e.g., a population of cells), including in any of the aforementioned aspects and embodiments of the method, the cell (e.g., population of cells) provided in step (a) is isolated from bone marrow, e.g., is isolated from bone marrow of a patient suffering from a hemoglobinopathy.

[0094] In aspects of the method of preparing a cell (e.g., a population of cells), including in any of the aforementioned aspects and embodiments of the method, the population of cells provided in step (a) is enriched for CD34+ cells.

[0095] In aspects of the method of preparing a cell (e.g., a population of cells), including in any of the aforementioned aspects and embodiments of the method, subsequent to the introducing of step (c), the cell (e.g., population of cells) is cryopreserved.

[0096] In aspects of the method of preparing a cell (e.g., a population of cells), including in any of the aforementioned aspects and embodiments of the method, subsequent to the introducing of step (c), the cell (e.g., population of cells) includes: a) an indel at or near a genomic DNA sequence complementary to the targeting domain of the first gRNA molecule; or b) a deletion including sequence, e.g., substantially all the sequence, complementary to the targeting domain of the first gRNA molecule (e.g., at least 90% complementary to the gRNA targeting domain, e.g., fully complementary to the gRNA targeting domain) in the ZNF644 gene region.

[0097] In aspects of the method of preparing a cell (e.g., a population of cells), including in any of the aforementioned aspects and embodiments of the method, after the introducing of step (c), at least about 40%, at least about 50%, at least about 60%, at least about 70%, at least about 80%, at least about 90%, at least about 95%, at least about 96%, at least about 97%, at least about 98% or at least about 99% of the cells of the population of cells include an indel at or near a genomic DNA sequence complementary to the targeting domain of the first gRNA molecule.

[0098] In an aspect, the invention provides a cell (e.g., population of cells), obtainable by a method of preparing a cell (e.g., a population of cells) described herein, e.g., described in any of the aforementioned method of preparing a cell aspects and embodiments.

[0099] In an aspect, the invention provides a method of treating a hemoglobinopathy in a human patient, including administering to a human patient a composition including a cell described herein, e.g., a cell of any of the aforementioned cell aspects and embodiments; or a population of cells described herein, e.g., a population of cells of any of the aforementioned population of cell aspects and embodiments. In aspects, the hemoglobinopathy is beta-thalassemia. In aspects, the hemoglobinopathy is sickle cell disease.

[0100] In an aspect, the invention provides a method of increasing fetal hemoglobin expression in a human patient, including administering to said human patient a composition including a cell described herein, e.g., a cell of any of the aforementioned cell aspects and embodiments; or a population of cells described herein, e.g., a population of cells of any of the aforementioned population of cell aspects and embodiments. In aspects, the human patients has beta-thalassemia. In aspects, the human patient has sickle cell disease.

[0101] In aspects of the method of treating a hemoglobinopathy or the method of increasing fetal hemoglobin expression, the human patient is administered a composition including at least about 1e6 cells (e.g., cells as described herein) per kg body weight of the human patient, e.g., at least about 1e6 CD34+ cells (e.g., cells as described herein) per kg body weight of the human patient. In aspects of the method of treating a hemoglobinopathy or the method of increasing fetal hemoglobin expression, the human patient is administered a composition including at least about 2e6 cells (e.g., cells as described herein) per kg body weight of the human patient, e.g., at least about 2e6 CD34+ cells (e.g., cells as described herein) per kg body weight of the human patient. In aspects of the method of treating a hemoglobinopathy or the method of increasing fetal hemoglobin expression, the human patient is administered a composition including about 2e6 cells (e.g., cells as described herein) per kg body weight of the human patient, e.g., about 2e6 CD34+ cells (e.g., cells as described herein) per kg body weight of the human patient. In aspects of the method of treating a hemoglobinopathy or the method of increasing fetal hemoglobin expression, the human patient is administered a composition including at least about 3e6 cells (e.g., cells as described herein) per kg body weight of the human patient, e.g., at least about 3e6 CD34+ cells (e.g., cells as described herein) per kg body weight of the human patient. In aspects of the method of treating a hemoglobinopathy or the method of increasing fetal hemoglobin expression, the human patient is administered a composition including about 3e6 cells (e.g., cells as described herein) per kg body weight of the human patient, e.g., about 3e6 CD34+ cells (e.g., cells as described herein) per kg body weight of the human patient. In aspects of the method of treating a hemoglobinopathy or the method of increasing fetal hemoglobin expression, the human patient is administered a composition including from about 2e6 to about 10e6 cells (e.g., cells as described herein) per kg body weight of the human patient, e.g., from about 2e6 to about 10e6 CD34+ cells (e.g., cells as described herein) per kg body weight of the human patient.

[0102] Also provided herein are methods for treating a hemoglobinopathy and by administering to a patient a cell or population of cells or a composition containing such cell or population of cells described herein, or a composition that reduces ZNF644 gene expression and/or ZNF644 protein activity. In aspects, the composition that reduces ZNF644 gene expression and/or ZNF644 protein activity comprises a small molecule compound, siRNA, shRNA, antisense oligonucleotide (ASO), miRNA, anti-microRNA oligonucleotide (AMO) or any combination thereof. In aspects, the hemoglobinopathy is beta-thalassemia or sickle cell disease.

[0103] Also provided herein are methods for increasing fetal hemoglobin expression in a mammal by administering to a patient a cell or population of cells or a composition containing such cell or population of cells described herein, or a composition that reduces ZNF644 gene expression and/or ZNF644 protein activity. In aspects, the composition that reduces ZNF644 gene expression and/or ZNF644 protein activity comprises a small molecule compound, siRNA, shRNA, antisense oligonucleotide (ASO), miRNA, anti-microRNA oligonucleotide (AMO) or any combination thereof.

[0104] In an aspect, the invention provides: a gRNA molecule described herein, e.g., a gRNA molecule of any of the aforementioned gRNA molecule aspects and embodiments; a composition described herein, e.g., a composition of any of the aforementioned composition aspects and embodiments, a nucleic acid described herein, e.g., a nucleic acid of any of the aforementioned nucleic acid aspects and embodiments; a vector described herein, e.g., a vector of any of the aforementioned vector aspects and embodiments; a cell described herein, e.g., a cell of any of the aforementioned cell aspects and embodiments; or a population of cells described herein, e.g., a population of cells of any of the aforementioned population of cells aspects and embodiments, or a composition that reduces ZNF644 gene expression and/or ZNF644 protein activity aspects and embodiments, for use as a medicament. In aspects, the composition that reduces ZNF644 gene expression and/or ZNF644 protein activity comprises a small molecule compound, siRNA, shRNA, antisense oligonucleotide (ASO), miRNA, anti-microRNA oligonucleotide (AMO) or any combination thereof.

[0105] In an aspect, the invention provides: a gRNA molecule described herein, e.g., a gRNA molecule of any of the aforementioned gRNA molecule aspects and embodiments; a composition described herein, e.g., a composition of any of the aforementioned composition aspects and embodiments, a nucleic acid described herein, e.g., a nucleic acid of any of the aforementioned nucleic acid aspects and embodiments; a vector described herein, e.g., a vector of any of the aforementioned vector aspects and embodiments; a cell described herein, e.g., a cell of any of the aforementioned cell aspects and embodiments; or a population of cells described herein, e.g., a population of cells of any of the aforementioned population of cells aspects and embodiments, or a composition that reduces ZNF644 gene expression and/or ZNF644 protein activity aspects and embodiments, for use in the manufacture of a medicament. In aspects, the composition that reduces ZNF644 gene expression and/or ZNF644 protein activity comprises a small molecule compound, siRNA, shRNA, antisense oligonucleotide (ASO), miRNA, anti-microRNA oligonucleotide (AMO) or any combination thereof.

[0106] In an aspect, the invention provides: a gRNA molecule described herein, e.g., a gRNA molecule of any of the aforementioned gRNA molecule aspects and embodiments; a composition described herein, e.g., a composition of any of the aforementioned composition aspects and embodiments, a nucleic acid described herein, e.g., a nucleic acid of any of the aforementioned nucleic acid aspects and embodiments; a vector described herein, e.g., a vector of any of the aforementioned vector aspects and embodiments; a cell described herein, e.g., a cell of any of the aforementioned cell aspects and embodiments; or a population of cells described herein, e.g., a population of cells of any of the aforementioned population of cells aspects and embodiments, or a composition that reduces ZNF644 gene expression and/or ZNF644 protein activity aspects and embodiments, for use in the treatment of a disease. In aspects, the composition that reduces ZNF644 gene expression and/or ZNF644 protein activity comprises a small molecule compound, siRNA, shRNA, antisense oligonucleotide (ASO), miRNA, anti-microRNA oligonucleotide (AMO) or any combination thereof.

[0107] In an aspect, the invention provides: a gRNA molecule described herein, e.g., a gRNA molecule of any of the aforementioned gRNA molecule aspects and embodiments; a composition described herein, e.g., a composition of any of the aforementioned composition aspects and embodiments, a nucleic acid described herein, e.g., a nucleic acid of any of the aforementioned nucleic acid aspects and embodiments; a vector described herein, e.g., a vector of any of the aforementioned vector aspects and embodiments; a cell described herein, e.g., a cell of any of the aforementioned cell aspects and embodiments; or a population of cells described herein, e.g., a population of cells of any of the aforementioned population of cells aspects and embodiments, or a composition that reduces ZNF644 gene expression and/or ZNF644 protein activity aspects and embodiments, for use in the treatment of a disease, wherein the disease is a hemoglobinopathy, for example, beta-thalassemia or sickle cell disease. In aspects, the composition that reduces ZNF644 gene expression and/or ZNF644 protein activity comprises a small molecule compound, siRNA, shRNA, antisense oligonucleotide (ASO), miRNA, anti-microRNA oligonucleotide (AMO) or any combination thereof.

### BRIEF DESCRIPTION OF THE DRAWINGS

[0108] FIG. 1A Frequency of HbF+ cells due to shRNA-mediated loss of ZNF644 in human mobilized peripheral blood CD34+ derived erythroid cells.

[0109] FIG. 1B Frequency of HbF+ cells due to CRISPR/Cas9-mediated loss of ZNF644 in human mobilized peripheral blood CD34+ derived erythroid cells.

### DETAILED DESCRIPTION

### Abbreviations

[0110] BSA bovine serum albumin
[0111] Cas9 CRISPR associated protein 9
[0112] CRISPR Clustered regularly interspaced short palindromic repeats
[0113] crRNA CRISPR RNA
[0114] DMEM Dulbecco's modified eagle media
[0115] FACS fluorescence-activated cell sorting
[0116] FBS fetal bovine serum
[0117] FITC fluorescein
[0118] h or hr hour
[0119] HbF Fetal hemoglobin
[0120] HEPES (4-(2-hydroxyethyl)-1-piperazineethanesulfonic acid)
[0121] IMDM Iscove's modified Dulbecco's medium
[0122] KCl potassium chloride
[0123] LCMS liquid chromatography mass spectrometry
[0124] M molar
[0125] mL milliliter
[0126] mM millimolar
[0127] mPB mobilized peripheral blood
[0128] PBS phosphate buffered saline
[0129] rhEPO recombinant human erythropoietin
[0130] rhIL-3 recombinant human interleukin-3
[0131] rhIL-6 recombinant human interleukin-6
[0132] rhSCF recombinant human stem cell factor
[0133] rhTPO recombinant human thrombopoietin
[0134] RNP ribonucleoprotein
[0135] shRNA short hairpin RNA
[0136] ZNF644 Zinc Finger Protein 644

### Definitions

[0137] The terms “CRISPR system,” “Cas system” or “CRISPR/Cas system” refer to a set of molecules comprising an RNA-guided nuclease or other effector molecule and a gRNA molecule that together are necessary and sufficient to direct and effect modification of nucleic acid at a target sequence by the RNA-guided nuclease or other effector molecule. In one embodiment, a CRISPR system comprises a gRNA and a Cas protein, e.g., a Cas9 protein. Such systems comprising a Cas9 or modified Cas9 molecule are referred to herein as “Cas9 systems” or “CRISPR/Cas9 systems.” In one example, the gRNA molecule and Cas molecule may be complexed, to form a ribonuclear protein (RNP) complex.

[0138] The terms “guide RNA,” “guide RNA molecule,” “gRNA molecule” or “gRNA” are used interchangeably, and refer to a set of nucleic acid molecules that promote the specific directing of a RNA-guided nuclease or other effector molecule (typically in complex with the gRNA molecule) to a target sequence. In some embodiments, said directing is accomplished through hybridization of a portion of the gRNA to DNA (e.g., through the gRNA targeting domain), and by binding of a portion of the gRNA molecule to the RNA-guided nuclease or other effector molecule (e.g., through at least the gRNA tracr). In embodiments, a gRNA molecule consists of a single contiguous polynucleotide molecule, referred to herein as a “single guide RNA” or “sgRNA” and the like. In other embodiments, a gRNA molecule consists of a plurality, usually two, polynucleotide molecules, which are themselves capable of association, usually through hybridization, referred to herein as a “dual guide RNA” or “dgRNA,” and the like. gRNA molecules are described in more detail below, but generally include a targeting domain and a tracr. In embodiments the targeting domain and tracr are disposed on a single polynucleotide. In other embodiments, the targeting domain and tracr are disposed on separate polynucleotides.

[0139] The term “targeting domain” as the term is used in connection with a gRNA, is the portion of the gRNA molecule that recognizes, e.g., is complementary to, a target sequence, e.g., a target sequence within the nucleic acid of a cell, e.g., within a gene.

[0140] The term “crRNA” as the term is used in connection with a gRNA molecule, is a portion of the gRNA molecule that comprises a targeting domain and a region that interacts with a tracr to form a flagpole region.

[0141] The term “target sequence” refers to a sequence of nucleic acids complimentary, for example fully complementary, to a gRNA targeting domain. In embodiments, the target sequence is disposed on genomic DNA. In an embodiment the target sequence is adjacent to (either on the same strand or on the complementary strand of DNA) a protospacer adjacent motif (PAM) sequence recognized by a protein having nuclease or other effector activity, e.g., a PAM sequence recognized by Cas9. In embodiments, the target sequence is a target sequence within a gene or locus that affects expression of a globin gene, e.g., that affects expression of beta globin or fetal hemoglobin (HbF). In embodiments, the target sequence is a target sequence within ZNF644 gene region.

[0142] The term “flagpole” as used herein in connection with a gRNA molecule, refers to the portion of the gRNA where the crRNA and the tracr bind to, or hybridize to, one another.

[0143] The term “tracr” as used herein in connection with a gRNA molecule, refers to the portion of the gRNA that binds to a nuclease or other effector molecule. In embodiments, the tracr comprises nucleic acid sequence that binds specifically to Cas9. In embodiments, the tracr comprises nucleic acid sequence that forms part of the flagpole.

[0144] The terms “Cas9” or “Cas9 molecule” refer to an enzyme from bacterial Type II CRISPR/Cas system responsible for DNA cleavage. Cas9 also includes wild-type protein as well as functional and non-functional mutants thereof. In embodiments, the Cas9 is a Cas9 of S. pyogenes.

[0145] The term “complementary” as used in connection with nucleic acid, refers to the pairing of bases, A with T or U, and G with C. The term complementary refers to nucleic acid molecules that are completely complementary, that is, form A to T or U pairs and G to C pairs across the entire reference sequence, as well as molecules that are at least 80%, 85%, 90%, 95%, 99% complementary.

[0146] “Template Nucleic Acid” as used in connection with homology-directed repair or homologous recombination, refers to nucleic acid to be inserted at the site of modification by the CRISPR system donor sequence for gene repair (insertion) at site of cutting.

[0147] An “indel,” as the term is used herein, refers to a nucleic acid comprising one or more insertions of nucleotides, one or more deletions of nucleotides, or a combination of insertions and deletions of nucleotides, relative to a reference nucleic acid, that results after being exposed to a composition comprising a gRNA molecule, for example a CRISPR system. Indels can be determined by sequencing nucleic acid after being exposed to a composition comprising a gRNA molecule, for example, by NGS. With respect to the site of an indel, an indel is said to be “at or near” a reference site (e.g., a site complementary to a targeting domain of a gRNA molecule) if it comprises at least one insertion or deletion within about 10, 9, 8, 7, 6, 5, 4, 3, 2, or 1 nucleotide(s) of the reference site, or is overlapping with part or all of said reference site (e.g., comprises at least one insertion or deletion overlapping with, or within 10, 9, 8, 7, 6, 5, 4, 3, 2, or 1 nucleotides of a site complementary to the targeting domain of a gRNA molecule, e.g., a gRNA molecule described herein). In embodiments, the indel is a large deletion, for example, comprising more than about 1 kb, more than about 2 kb, more than about 3 kb, more than about 4 kb, more than about 5 kb, more than about 6 kb, or more than about 10 kb of nucleic acid. In embodiments, the 5′ end, the 3′ end, or both the 5′ and 3′ ends of the large deletion are disposed at or near a target sequence of a gRNA molecule described herein. In embodiments, the large deletion comprises about 4.9 kb of DNA disposed between a target sequence of a gRNA molecule, e.g., described herein, disposed within the ZNF644 gene region.

[0148] An “indel pattern,” as the term is used herein, refers to a set of indels that results after exposure to a composition comprising a gRNA molecule. In an embodiment, the indel pattern consists of the top three indels, by frequency of appearance. In an embodiment, the indel pattern consists of the top five indels, by frequency of appearance. In an embodiment, the indel pattern consists of the indels which are present at greater than about 1% frequency relative to all sequencing reads. In an embodiment, the indel pattern consists of the indels which are present at greater than about 5% frequency relative to all sequencing reads. In an embodiment, the indel pattern consists of the indels which are present at greater than about 10% frequency relative to total number of indel sequencing reads (i.e., those reads that do not consist of the unmodified reference nucleic acid sequence). In an embodiment, the indel pattern includes of any 3 of the top five most frequently observed indels. The indel pattern may be determined, for example, by methods described herein, e.g., by sequencing cells of a population of cells which were exposed to the gRNA molecule.

[0149] An “off-target indel,” as the term is used herein, refers to an indel at or near a site other than the target sequence of the targeting domain of the gRNA molecule. Such sites may comprise, for example, 1, 2, 3, 4, 5 or more mismatch nucleotides relative to the sequence of the targeting domain of the gRNA. In exemplary embodiments, such sites are detected using targeted sequencing of in silico predicted off-target sites, or by an insertional method known in the art. With respect to the gRNAs described herein, examples of off-target indels are indels formed at sequences outside of the ZNF644 gene region. In exemplary embodiments the off-target indel is formed in a sequence of a gene, e.g., within a coding sequence of a gene.

[0150] The term “a” and “an” refers to one or to more than one (i.e., to at least one) of the grammatical object of the article. By way of example, “an element” means one element or more than one element.

[0151] The term “and/or” means either “and” or “or” unless indicated otherwise.

[0152] The term “about” when referring to a measurable value such as an amount, a temporal duration, and the like, is meant to encompass variations of 20% or in some instances ±10%, or in some instances ±5%, or in some instances ±1%, or in some instances ±0.1% from the specified value, as such variations are appropriate to perform the disclosed methods.

[0153] The term “antigen” or “Ag” refers to a molecule that provokes an immune response. This immune response may involve either antibody production, or the activation of specific immunologically-competent cells, or both. The skilled artisan will understand that any macromolecule, including virtually all proteins or peptides, can serve as an antigen. Furthermore, antigens can be derived from recombinant or genomic DNA. A skilled artisan will understand that any DNA, which comprises a nucleotide sequences or a partial nucleotide sequence encoding a protein that elicits an immune response therefore encodes an “antigen” as that term is used herein. Furthermore, one skilled in the art will understand that an antigen need not be encoded solely by a full length nucleotide sequence of a gene. It is readily apparent that the present invention includes, but is not limited to, the use of partial nucleotide sequences of more than one gene and that these nucleotide sequences are arranged in various combinations to encode polypeptides that elicit the desired immune response. Moreover, a skilled artisan will understand that an antigen need not be encoded by a “gene” at all. It is readily apparent that an antigen can be synthesized or can be derived from a biological sample, or might be macromolecule besides a polypeptide. Such a biological sample can include, but is not limited to a tissue sample, a cell or a fluid with other biological components.

[0154] The term “autologous” refers to any material derived from the same individual into whom it is later to be re-introduced.

[0155] The term “allogeneic” refers to any material derived from a different animal of the same species as the individual to whom the material is introduced. Two or more individuals are said to be allogeneic to one another when the genes at one or more loci are not identical. In some aspects, allogeneic material from individuals of the same species may be sufficiently unlike genetically to interact antigenically.

[0156] The term “xenogeneic” refers to a graft derived from an animal of a different species.

[0157] “Derived from” as that term is used herein, indicates a relationship between a first and a second molecule. It generally refers to structural similarity between the first molecule and a second molecule and does not connotate or include a process or source limitation on a first molecule that is derived from a second molecule.

[0158] The term “encoding” refers to the inherent property of specific sequences of nucleotides in a polynucleotide, such as a gene, a cDNA, or an mRNA, to serve as templates for synthesis of other polymers and macromolecules in biological processes having either a defined sequence of nucleotides (e.g., rRNA, tRNA and mRNA) or a defined sequence of amino acids and the biological properties resulting therefrom. Thus, a gene, cDNA, or RNA, encodes a protein if transcription and translation of mRNA corresponding to that gene produces the protein in a cell or other biological system. Both the coding strand, the nucleotide sequence of which is identical to the mRNA sequence and is usually provided in sequence listings, and the non-coding strand, used as the template for transcription of a gene or cDNA, can be referred to as encoding the protein or other product of that gene or cDNA.

[0159] Unless otherwise specified, a “nucleotide sequence encoding an amino acid sequence” includes all nucleotide sequences that are degenerate versions of each other and that encode the same amino acid sequence. The phrase nucleotide sequence that encodes a protein or a RNA may also include introns to the extent that the nucleotide sequence encoding the protein may in some versions contain an intron(s).

[0160] The terms “effective amount” and “therapeutically effective amount” are used interchangeably herein, and refer to an amount of a compound, formulation, material, or composition, as described herein effective to achieve a particular biological result, for example, reduction or inhibition of an enzyme or a protein activity, or ameliorate symptoms, alleviate conditions, slow or delay disease progression, or prevent a disease, etc. In one embodiment, the term “a therapeutically effective amount” refers to the amount of the compound of the disclosure that, when administered to a subject, is effective to (1) at least partially alleviate, prevent and/or ameliorate a condition, or a disorder or a disease (i) mediated by ZNF644, or (ii) associated with ZNF644 activity, or (iii) characterized by activity (normal or abnormal) of ZNF644: (2) reduce or inhibit the activity of ZNF644; or (3) reduce or inhibit the expression level of ZNF644 gene and/or protein. In another embodiment, the term “a therapeutically effective amount” refers to the amount of the compound of the disclosure that, when administered to a cell, or a tissue, or a non-cellular biological material, or a medium, is effective to at least partially reducing or inhibiting the activity of ZNF644; or at least partially reducing or inhibiting the expression level of ZNF644 gene and/or protein.

[0161] As used herein, the term “inhibit”, “inhibition” or “inhibiting” refers to the reduction or suppression of a given condition, symptom, or disorder, or disease, or a significant decrease in the baseline activity of a biological activity or process, or a decrease in the baseline expression level of a gene and/or a protein of interest.

[0162] The term “endogenous” refers to any material from or produced inside an organism, cell, tissue or system.

[0163] The term “exogenous” refers to any material introduced from or produced outside an organism, cell, tissue or system.

[0164] The term “expression” refers to the transcription and/or translation of a particular nucleotide sequence driven by a promoter.

[0165] The term “transfer vector” refers to a composition of matter which comprises an isolated nucleic acid and which can be used to deliver the isolated nucleic acid to the interior of a cell. Numerous vectors are known in the art including, but not limited to, linear polynucleotides, polynucleotides associated with ionic or amphiphilic compounds, plasmids, and viruses. Thus, the term “transfer vector” includes an autonomously replicating plasmid or a virus. The term should also be construed to further include non-plasmid and non-viral compounds which facilitate transfer of nucleic acid into cells, such as, for example, a polylysine compound, liposome, and the like. Examples of viral transfer vectors include, but are not limited to, adenoviral vectors, adeno-associated virus vectors, retroviral vectors, lentiviral vectors, and the like.

[0166] The term “expression vector” refers to a vector comprising a recombinant polynucleotide comprising expression control sequences operatively linked to a nucleotide sequence to be expressed. An expression vector comprises sufficient cis-acting elements for expression; other elements for expression can be supplied by the host cell or in an in vitro expression system. Expression vectors include all those known in the art, including cosmids, plasmids (e.g., naked or contained in liposomes) and viruses (e.g., lentiviruses, retroviruses, adenoviruses, and adeno-associated viruses) that incorporate the recombinant polynucleotide.

[0167] The term “homologous” or “identity” refers to the subunit sequence identity between two polymeric molecules, e.g., between two nucleic acid molecules, such as, two DNA molecules or two RNA molecules, or between two polypeptide molecules. When a subunit position in both of the two molecules is occupied by the same monomeric subunit; e.g., if a position in each of two DNA molecules is occupied by adenine, then they are homologous or identical at that position. The homology between two sequences is a direct function of the number of matching or homologous positions; e.g., if half (e.g., five positions in a polymer ten subunits in length) of the positions in two sequences are homologous, the two sequences are 50% homologous; if 90% of the positions (e.g., 9 of 10), are matched or homologous, the two sequences are 90% homologous.

[0168] The term “isolated” means altered or removed from the natural state. For example, a nucleic acid or a peptide naturally present in a living animal is not “isolated,” but the same nucleic acid or peptide partially or completely separated from the coexisting materials of its natural state is “isolated.” An isolated nucleic acid or protein can exist in substantially purified form, or can exist in a non-native environment such as, for example, a host cell.

[0169] The term “operably linked” or “transcriptional control” refers to functional linkage between a regulatory sequence and a heterologous nucleic acid sequence resulting in expression of the latter. For example, a first nucleic acid sequence is operably linked with a second nucleic acid sequence when the first nucleic acid sequence is placed in a functional relationship with the second nucleic acid sequence. For instance, a promoter is operably linked to a coding sequence if the promoter affects the transcription or expression of the coding sequence. Operably linked DNA sequences can be contiguous with each other and, e.g., where necessary to join two protein coding regions, are in the same reading frame.

[0170] The term “parenteral” administration of an immunogenic composition includes, e.g., subcutaneous (s.c.), intravenous (i.v.), intramuscular (i.m.), or intrasternal injection, intratumoral, or infusion techniques.

[0171] The term “nucleic acid” or “polynucleotide” refers to deoxyribonucleic acids (DNA) or ribonucleic acids (RNA) and polymers thereof in either single- or double-stranded form. Unless specifically limited, the term encompasses nucleic acids containing known analogues of natural nucleotides that have similar binding properties as the reference nucleic acid and are metabolized in a manner similar to naturally occurring nucleotides. Unless otherwise indicated, a particular nucleic acid sequence also implicitly encompasses conservatively modified variants thereof (e.g., degenerate codon substitutions), alleles, orthologs, SNPs, and complementary sequences as well as the sequence explicitly indicated. Specifically, degenerate codon substitutions may be achieved by generating sequences in which the third position of one or more selected (or all) codons is substituted with mixed-base and/or deoxyinosine residues (Batzer et al., Nucleic Acid Res. 19:5081 (1991); Ohtsuka et al., J. Biol. Chem. 260:2605-2608 (1985); and Rossolini et al., Mol. Cell. Probes 8:91-98 (1994)).

[0172] The terms “peptide,” “polypeptide,” and “protein” are used interchangeably, and refer to a compound comprised of amino acid residues covalently linked by peptide bonds. A protein or peptide must contain at least two amino acids, and no limitation is placed on the maximum number of amino acids that can comprise a protein's or peptide's sequence. Polypeptides include any peptide or protein comprising two or more amino acids joined to each other by peptide bonds. As used herein, the term refers to both short chains, which also commonly are referred to in the art as peptides, oligopeptides and oligomers, for example, and to longer chains, which generally are referred to in the art as proteins, of which there are many types. “Polypeptides” include, for example, biologically active fragments, substantially homologous polypeptides, oligopeptides, homodimers, heterodimers, variants of polypeptides, modified polypeptides, derivatives, analogs, fusion proteins, among others. A polypeptide includes a natural peptide, a recombinant peptide, or a combination thereof.

[0173] The term “promoter” refers to a DNA sequence recognized by the synthetic machinery of the cell, or introduced synthetic machinery, required to initiate the specific transcription of a polynucleotide sequence.

[0174] The term “promoter/regulatory sequence” refers to a nucleic acid sequence which is required for expression of a gene product operably linked to the promoter/regulatory sequence. In some instances, this sequence may be the core promoter sequence and in other instances, this sequence may also include an enhancer sequence and other regulatory elements which are required for expression of the gene product. The promoter/regulatory sequence may, for example, be one which expresses the gene product in a tissue specific manner.

[0175] The term “constitutive” promoter refers to a nucleotide sequence which, when operably linked with a polynucleotide which encodes or specifies a gene product, causes the gene product to be produced in a cell under most or all physiological conditions of the cell.

[0176] The term “inducible” promoter refers to a nucleotide sequence which, when operably linked with a polynucleotide which encodes or specifies a gene product, causes the gene product to be produced in a cell substantially only when an inducer which corresponds to the promoter is present in the cell.

[0177] The term “tissue-specific” promoter refers to a nucleotide sequence which, when operably linked with a polynucleotide encodes or specified by a gene, causes the gene product to be produced in a cell substantially only if the cell is a cell of the tissue type corresponding to the promoter.

[0178] As used herein “modulator” or “degrader”, means, for example, a compound of the disclosure, that effectively modulates, decreases, or reduces the levels of a specific protein (e.g., ZNF644). The amount of a specific protein (e.g., ZNF644) can be measured by comparing the amount of the specific protein (e.g., ZNF644) remaining after treatment with a compound of the disclosure as compared to the initial amount or level of the specific protein (e.g., ZNF644) present as measured prior to treatment with a compound of the disclosure.

[0179] As used herein “selective modulator”, “selective degrader”, or “selective compound” means, for example, a compound of the disclosure, that effectively modulates, decreases, or reduces the levels of a specific protein (e.g., ZNF644) to a greater extent than any other protein. A “selective modulator”, “selective degrader”, or “selective compound” canbe identified, for example, by comparing the ability of a compound to modulate, decrease, or reduce the levels of or to degrade a specific protein (e.g., ZNF644) to its ability to modulate, decrease, or reduce the levels of other proteins. In some embodiments, the selectivity can be identified by measuring the EC₅₀ or IC₅₀ of the compounds.

[0180] As used herein in connection with a messenger RNA (mRNA), a 5′ cap (also termed an RNA cap, an RNA 7-methylguanosine cap or an RNA m7G cap) is a modified guanine nucleotide that has been added to the “front” or 5′ end of a eukaryotic messenger RNA shortly after the start of transcription. The 5′ cap consists of a terminal group which is linked to the first transcribed nucleotide. Its presence is critical for recognition by the ribosome and protection from RNases. Cap addition is coupled to transcription, and occurs co-transcriptionally, such that each influences the other. Shortly after the start of transcription, the 5′ end of the mRNA being synthesized is bound by a cap-synthesizing complex associated with RNA polymerase. This enzymatic complex catalyzes the chemical reactions that are required for mRNA capping. Synthesis proceeds as a multi-step biochemical reaction. The capping moiety can be modified to modulate functionality of mRNA such as its stability or efficiency of translation.

[0181] As used herein, “in vitro transcribed RNA” or “IVT RNA” refers to RNA, preferably mRNA, that has been synthesized in vitro. Generally, the in vitro transcribed RNA is generated from an in vitro transcription vector. The in vitro transcription vector comprises a template that is used to generate the in vitro transcribed RNA.

[0182] As used herein, a “poly(A)” is a series of adenosines attached by polyadenylation to the mRNA. In the preferred embodiment of a construct for transient expression, the polyA is between 50 and 5000 (SEQ ID NO: 3118), preferably greater than 64, more preferably greater than 100, most preferably greater than 300 or 400. poly(A) sequences can be modified chemically or enzymatically to modulate mRNA functionality such as localization, stability or efficiency of translation.

[0183] As used herein, “polyadenylation” refers to the covalent linkage of a polyadenylyl moiety, or its modified variant, to a messenger RNA molecule. In eukaryotic organisms, most messenger RNA (mRNA) molecules are polyadenylated at the 3′ end. The 3′ poly(A) tail is a long sequence of adenine nucleotides (often several hundred) added to the pre-mRNA through the action of an enzyme, polyadenylate polymerase. In higher eukaryotes, the poly(A) tail is added onto transcripts that contain a specific sequence, the polyadenylation signal. The poly(A) tail and the protein bound to it aid in protecting mRNA from degradation by exonucleases. Polyadenylation is also important for transcription termination, export of the mRNA from the nucleus, and translation. Polyadenylation occurs in the nucleus immediately after transcription of DNA into RNA, but additionally can also occur later in the cytoplasm. After transcription has been terminated, the mRNA chain is cleaved through the action of an endonuclease complex associated with RNA polymerase. The cleavage site is usually characterized by the presence of the base sequence AAUAAA near the cleavage site. After the mRNA has been cleaved, adenosine residues are added to the free 3′ end at the cleavage site.

[0184] As used herein, “transient” refers to expression of a non-integrated transgene for a period of hours, days or weeks, wherein the period of time of expression is less than the period of time for expression of the gene if integrated into the genome or contained within a stable plasmid replicon in the host cell.

[0185] As used herein, the terms “treat”, “treatment” and “treating” refer to the reduction or amelioration of the progression, severity and/or duration of a disorder, e.g., a hemoglobinopathy, or the amelioration of one or more symptoms (preferably, one or more discernible symptoms) of a disorder, e.g., a hemoglobinopathy, resulting from the administration of one or more therapies (e.g., one or more therapeutic agents such as a gRNA molecule, CRISPR system, or modified cell of the invention). In specific embodiments, the terms “treat”, “treatment” and “treating” refer to the amelioration of at least one measurable physical parameter of a hemoglobinopathy disorder, not discernible by the patient. In other embodiments the terms “treat”, “treatment” and “treating” refer to the inhibition of the progression of a disorder, either physically by, e.g., stabilization of a discernible symptom, physiologically by, e.g., stabilization of a physical parameter, or both. In other embodiments the terms “treat”, “treatment” and “treating” refer to the reduction or stabilization of a symptom of a hemoglobinopathy, e.g., sickle cell disease or beta-thalassemia.

[0186] As used herein, the term “prevent”, “preventing” or “prevention” of any disease or disorder refers to the prophylactic treatment of the disease or disorder; or delaying the onset or progression of the disease or disorder.

[0187] As used herein, “HbF-dependent disease or disorder” means any disease or disorder which is directly or indirectly affected by the modulation of HbF protein levels. Preferable examples of such disease or disorders are hemoglobinopathies, such as sickle cell disease or a thalassemia (e.g., beta-thalassemia).

[0188] As used herein, a subject is “in need of” a treatment if such subject would benefit biologically, medically or in quality of life from such treatment.

[0189] The term “signal transduction pathway” refers to the biochemical relationship between avariety of signal transduction molecules that play a role in the transmission of a signal from one portion of a cell to another portion of a cell. The phrase “cell surface receptor” includes molecules and complexes of molecules capable of receiving a signal and transmitting signal across the membrane of a cell.

[0190] The term “subject” is intended to include living organisms in which an immune response can be elicited (e.g., mammals, human). Preferably, the term “subject” refers to primates (e.g., humans, male or female), dogs, rabbits, guinea pigs, pigs, rats and mice. In certain embodiments, the subject is a primate. In yet other embodiments, the subject is a human.

[0191] The term, a “substantially purified” cell refers to a cell that is essentially free of other cell types. A substantially purified cell also refers to a cell which has been separated from other cell types with which it is normally associated in its naturally occurring state. In some instances, a population of substantially purified cells refers to a homogenous population of cells. In other instances, this term refers simply to cell that have been separated from the cells with which they are naturally associated in their natural state. In some aspects, the cells are cultured in vitro. In other aspects, the cells are not cultured in vitro.

[0192] The term “therapeutic” as used herein means a treatment. A therapeutic effect is obtained by reduction, suppression, remission, or eradication of a disease state.

[0193] The term “prophylaxis” as used herein means the prevention of or protective treatment for a disease or disease state.

[0194] The term “transfected” or “transformed” or “transduced” refers to a process by which exogenous nucleic acid and/or protein is transferred or introduced into the host cell. A “transfected” or “transformed” or “transduced” cell is one which has been transfected, transformed or transduced with exogenous nucleic acid and/or protein. The cell includes the primary subject cell and its progeny.

[0195] The term “specifically binds,” refers to a molecule recognizing and binding with a binding partner (e.g., a protein or nucleic acid) present in a sample, but which molecule does not substantially recognize or bind other molecules in the sample.

[0196] The term “bioequivalent” refers to an amount of an agent other than the reference compound, required to produce an effect equivalent to the effect produced by the reference dose or reference amount of the reference compound.

[0197] “Refractory” as used herein refers to a disease, e.g., a hemoglobinopathy, that does not respond to a treatment. In embodiments, a refractory hemoglobinopathy can be resistant to a treatment before or at the beginning of the treatment. In other embodiments, the refractory hemoglobinopathy can become resistant during a treatment. A refractory hemoglobinopathy is also called a resistant hemoglobinopathy.

[0198] “Relapsed” as used herein refers to the return of a disease (e.g., hemoglobinopathy) or the signs and symptoms of a disease such as a hemoglobinopathy after a period of improvement, e.g., after prior treatment of a therapy, e.g., hemoglobinopathy therapy.

[0199] Ranges: throughout this disclosure, various aspects of the invention can be presented in a range format. It should be understood that the description in range format is merely for convenience and brevity and should not be construed as an inflexible limitation on the scope of the invention. Accordingly, the description of a range should be considered to have specifically disclosed all the possible subranges as well as individual numerical values within that range. For example, description of a range such as from 1 to 6 should be considered to have specifically disclosed subranges such as from 1 to 3, from 1 to 4, from 1 to 5, from 2 to 4, from 2 to 6, from 3 to 6 etc., as well as individual numbers within that range, for example, 1, 2, 2.7, 3, 4, 5, 5.3, and 6. As another example, a range such as 95-99% identity, includes something with 95%, 96%, 97%, 98% or 99% identity, and includes subranges such as 96-99%, 96-98%, 96-97%, 97-99%, 97-98% and 98-99% identity. This applies regardless of the breadth of the range.

[0200] The term “ZNF644” refers to Widely-Interspaced Zinc Finger-Containing Protein or variants or homologs thereof that maintain its transcriptional activity (e.g. within at least 50%, 80%, 90%, 95%, 96%, 97%, 98%, 99% or 100% activity compared to ZNF644), and the gene encoding said protein, together with all introns and exons as well as its regulatory regions such as promoters and enhancers. This gene encodes a zinc-finger protein. ZNF644 is also known as Zinc Finger Protein 803, ZNF803, Widely Interspaced Zinc Finger Motifs, ZNF644 Zinc Finger. The term encompasses all isoforms and splice variants of ZNF644. The human gene encoding ZNF644 is mapped to chromosomal location Chromosome 19: 15,419,980-15,449,951 (by Ensembl). The human and murine amino acid and nucleic acid sequences can be found in a public database, such as GenBank, UniProt and Swiss-Prot., and the genomic sequence of human ZNF644 can be found in GenBank at NC_000019.10. The ZNF644 gene refers to this genomic location, including all introns and exon. There are multiple known isotypes of ZNF644. In some embodiments, the variants or homologs have at least 90%, 95%, 96%, 97%, 98%, 99% or 100% amino acid sequence identity across the whole sequence or a portion of the sequence (e.g. a 50, 100, 150 or 200 continuous amino acid portion) compared to a naturally occurring ZNF644 protein. Exemplary ZNF644 transcript variants and their genomic coordinates are shown in Table 4.

TABLE 4
Genomic coordinates of ZNF644 transcripts variants.

| Variant | Exon_id | chrom | Start | End | Variant_exon_name | Strand |
|---|---|---|---|---|---|---|
| NCBI_tv1_NM_201269.3 | exon_6 | chr1 | 90915306 | 90916990 | NCBI_tv1_NM_201269.3_exon_6 | — |
| NCBI_tv1_NM_201269.3 | exon_5 | chr1 | 90918052 | 90918154 | NCBI_tv1_NM_201269.3_exon_5 | — |
| NCBI_tv1_NM_201269.3 | exon_4 | chr1 | 90937485 | 90938090 | NCBI_tv1_NM_201269.3_exon_4 | — |
| NCBI_tv1_NM_201269.3 | exon_3 | chr1 | 90938272 | 90941309 | NCBI_tv1_NM_201269.3_exon_3 | — |
| NCBI_tv1_NM_201269.3 | exon_2 | chr1 | 90982310 | 90982370 | NCBI_tv1_NM_201269.3_exon_2 | — |
| NCBI_tv1_NM_201269.3 | exon_1 | chr1 | 91021990 | 91022035 | NCBI_tv1_NM_201269.3_exon_1 | — |
| NCBI_tv2_NM_032186.5 | exon_4 | chr1 | 90915300 | 90916990 | NCBI_tv2_NM_032186.5_exon_4 | — |
| NCBI_tv2_NM_032186.5 | exon_3 | chr1 | 90918052 | 90918154 | NCBI_tv2_NM_032186.5_exon_3 | — |
| NCBI_tv2_NM_032186.5 | exon_2 | chr1 | 90982310 | 90982370 | NCBI_tv2_NM_032186.5_exon_2 | — |
| NCBI_tv2_NM_032186.5 | exon_1 | chr1 | 91021990 | 21022255 | NCBI_tv2_NM_032186.5_exon_1 | — |
| NCBI_tv3_NM_016620.4 | exon_4 | chr1 | 90915300 | 90916990 | NCBI_tv3_NM_016620.4_exon_4 | — |
| NCBI_tv3_NM_016620.4 | exon_3 | chr1 | 90918052 | 90918154 | NCBI_tv3_NM_016620.4_exon_3 | — |
| NCBI_tv3_NM_016620.4 | exon_2 | chr1 | 90982310 | 90982370 | NCBI_tv3_NM_016620.4_exon_2 | — |
| NCBI_tv3_NM_016620.4 | exon_1 | chr1 | 91021273 | 91021508 | NCBI_tv3_NM_016620.4_exon_1 | — |
| ZNF644-201_(Ensembl) | exon_6 | chr1 | 90915304 | 90916990 | ZNF644-201_(Ensembl)_exon_6 | — |
| ZNF644-201_(Ensembl) | exon_5 | chr1 | 90918052 | 90918154 | ZNF644-201_(Ensembl)_exon_5 | — |
| ZNF644-201_(Ensembl) | exon_4 | chr1 | 90937485 | 90938090 | ZNF644-201_(Ensembl)_exon_4 | — |
| ZNF644-201_(Ensembl) | exon_3 | chr1 | 90938272 | 90941309 | ZNF644-201_(Ensembl)_exon_3 | — |
| ZNF644-201_(Ensembl) | exon_2 | chr1 | 90982310 | 90982370 | ZNF644-201_(Ensembl)_exon_2 | — |
| ZNF644-201_(Ensembl) | exon_1 | chr1 | 91021990 | 91022035 | ZNF644-201_(Ensembl)_exon_1 | — |
| ZNF644-202_(Ensembl) | exon_4 | chr1 | 90915304 | 90916990 | ZNF644-202_(Ensembl)_exon_4 | — |
| ZNF644-202_(Ensembl) | exon_3 | chr1 | 90918052 | 90918154 | ZNF644-202_(Ensembl)_exon_3 | — |
| ZNF644-202_(Ensembl) | exon_2 | chr1 | 90982310 | 90982370 | ZNF644-202_(Ensembl)_exon_2 | — |
| ZNF644-202_(Ensembl) | exon_1 | chr1 | 91021273 | 91021457 | ZNF644-202_(Ensembl)_exon_1 | — |
| ZNF644-203_(Ensembl) | exon_4 | chr1 | 90916185 | 90916990 | ZNF644-203_(Ensembl)_exon_4 | — |
| ZNF644-203_(Ensembl) | exon_3 | chr1 | 90918052 | 90918154 | ZNF644-203_(Ensembl)_exon_3 | — |
| ZNF644-203_(Ensembl) | exon_2 | chr1 | 90982310 | 90982370 | ZNF644-203_(Ensembl)_exon_2 | — |
| ZNF644-203_(Ensembl) | exon_1 | chr1 | 91021990 | 91022272 | ZNF644-203_(Ensembl)_exon_1 | — |
| ZNF644-204_(Ensembl) | exon_6 | chr1 | 90915298 | 90916990 | ZNF644-204_(Ensembl)_exon_6 | — |
| ZNF644-204_(Ensembl) | exon_5 | chr1 | 90918052 | 90918154 | ZNF644-204_(Ensembl)_exon_5 | — |
| ZNF644-204_(Ensembl) | exon_4 | chr1 | 90937485 | 90938090 | ZNF644-204_(Ensembl)_exon_4 | — |
| ZNF644-204_(Ensembl) | exon_3 | chr1 | 90938272 | 90941309 | ZNF644-204_(Ensembl)_exon_3 | — |
| ZNF644-204_(Ensembl) | exon_2 | chr1 | 90982310 | 90982370 | ZNF644-204_(Ensembl)_exon_2 | — |
| ZNF644-204_(Ensembl) | exon_1 | chr1 | 91021273 | 91021473 | ZNF644-204_(Ensembl)_exon_1 | — |
| ZNF644-205_(Ensembl) | exon_5 | chr1 | 90916390 | 90916990 | ZNF644-205_(Ensembl)_exon_5 | — |
| ZNF644-205_(Ensembl) | exon_4 | chr1 | 90918052 | 90918154 | ZNF644-205_(Ensembl)_exon_4 | — |
| ZNF644-205_(Ensembl) | exon_3 | chr1 | 90973153 | 90973213 | ZNF644-205_(Ensembl)_exon_3 | — |
| ZNF644-205_(Ensembl) | exon_2 | chr1 | 90982310 | 90982370 | ZNF644-205_(Ensembl)_exon_2 | — |
| ZNF644-205_(Ensembl) | exon_1 | chr1 | 91021990 | 91022014 | ZNF644-205_(Ensembl)_exon_1 | — |
| ZNF644-206_(Ensembl) | exon_2 | chr1 | 90972744 | 90973213 | ZNF644-206_(Ensembl)_exon_2 | — |
| ZNF644-206_(Ensembl) | exon_1 | chr1 | 90982310 | 90982370 | ZNF644-206_(Ensembl)_exon_1 | — |
| ZNF644-207_(Ensembl) | exon_3 | chr1 | 90916490 | 90916990 | ZNF644-207_(Ensembl)_exon_3 | — |
| ZNF644-207_(Ensembl) | exon_2 | chr1 | 90918052 | 90918154 | ZNF644-207_(Ensembl)_exon_2 | — |
| ZNF644-207_(Ensembl) | exon_1 | chr1 | 90935408 | 90935528 | ZNF644-207_(Ensembl)_exon_1 | — |
| ZNF644-208_(Ensembl) | exon_2 | chr1 | 91020529 | 91021201 | ZNF644-208_(Ensembl)_exon_2 | — |
| ZNF644-208_(Ensembl) | exon_1 | chr1 | 91021689 | 91021725 | ZNF644-208_(Ensembl)_exon_1 | — |
| ZNF644-209_(Ensembl) | exon_2 | chr1 | 90916791 | 90916990 | ZNF644-209_(Ensembl)_exon_2 | — |
| ZNF644-209_(Ensembl) | exon_1 | chr1 | 90918052 | 90918391 | ZNF644-209_(Ensembl)_exon_1 | — |
| ZNF644-210_(Ensembl) | exon_2 | chr1 | 91020448 | 91021201 | ZNF644-210_(Ensembl)_exon_2 | — |
| ZNF644-210_(Ensembl) | exon_1 | chr1 | 91021990 | 91022055 | ZNF644-210_(Ensembl)_exon_1 | — |
| ZNF644-211_(Ensembl) | exon_3 | chr1 | 90940949 | 90941309 | ZNF644-211_(Ensembl)_exon_3 | — |
| ZNF644-211_(Ensembl) | exon_2 | chr1 | 90982310 | 90982370 | ZNF644-211_(Ensembl)_exon_2 | — |
| ZNF644-211_(Ensembl) | exon_1 | chr1 | 91021990 | 91022081 | ZNF644-211_(Ensembl)_exon_1 | — |
| ZNF644-212_(Ensembl) | exon_3 | chr1 | 90937883 | 90937937 | ZNF644-212_(Ensembl)_exon_3 | — |
| ZNF644-212_(Ensembl) | exon_2 | chr1 | 90937939 | 90938090 | ZNF644-212_(Ensembl)_exon_2 | — |
| ZNF644-212_(Ensembl) | exon_1 | chr1 | 90938272 | 90940120 | ZNF644-212_(Ensembl)_exon_1 | — |

[0201] In embodiments, exemplary ZNF644 transcript variants along with their nucleotide and protein sequences are shown below in Table 5.

TABLE 5
ZNF644 transcript variants compositions.

| | | | SEQ | |
|---|---|---|---|---|
| name_of_ZNF644_ | transcript_variant_ | | ID | Encoded |
| transcript_variant | composition | seq_name | NO | protein |
| NCBI_tv1: NM_201269.3 | exon_01_nc.5; | NCBI_RefSeq_NM_ | 2614 | UniProt |
| | exon_01_nc.6; | 201269.3_transcript_ | | Q9H582-1 |
| | exon_05_nc.1; | variant_1_mRNA | | (SEQ ID NO: |
| | exon_05_c.1/nc.2; | | | 2642) |
| | exon_05_c.2/nc.3; | | | |
| | exon_07_c.1/nc.1; | | | |
| | exon_07_c.1/; | | | |
| | exon_07_c.1/nc.2; | | | |
| | exon_07_c.2; exon_08_c; | | | |
| | exon_08_c; exon_08_c/nc; | | | |
| | exon_08_c; | | | |
| | exon_10_c.1/nc.2; | | | |
| | exon_11_c.1/nc.1; | | | |
| | exon_11_nc.2; | | | |
| | exon_11_nc.3; | | | |
| | exon_11_nc.4; | | | |
| | exon_11_nc.5; | | | |
| | exon_11_nc.6 | | | |
| NCBI_tv2: NM_032186.5 | exon_01_nc.2; | NCBI_RefSeq_NM_ | 2615 | UniProt |
| | exon_01_nc.3; | 032186.5_transcript_ | | Q9H582-3 |
| | exon_01_nc.4; | variant_2_mRNA | | (SEQ ID NO: |
| | exon_01_nc.5; | | | 2643) |
| | exon_01_nc.6; | | | |
| | exon_05_nc.1; | | | |
| | exon_05_c.1/nc.2; | | | |
| | exon_05_c.2/nc.3; | | | |
| | exon_10_c.1/nc.2; | | | |
| | exon_11_c.1/nc.1; | | | |
| | exon_11_nc.2; | | | |
| | exon_11_nc.3; | | | |
| | exon_11_nc.4; | | | |
| | exon_11_nc.5; | | | |
| | exon_11_nc.6; | | | |
| | exon_11_nc.7; | | | |
| | exon_11_nc.8 | | | |
| NCBI_tv3: NM_016620.4 | exon_02_nc; | NCBI_RefSeq_NM_ | 2616 | UniProt |
| | exon_03_nc.1; | 016620.4_transcript_ | | Q9H582-3 |
| | exon_03_nc.2; | variant_3_mRNA | | (SEQ ID NO: |
| | exon_03_nc.3; | | | 2643) |
| | exon_05_nc.1; | | | |
| | exon_05_c.1/nc.2; | | | |
| | exon_05_c.2/nc.3; | | | |
| | exon_10_c.1/nc.2; | | | |
| | exon_11_c.1/nc.1; | | | |
| | exon_11_nc.2; | | | |
| | exon_11_nc.3; | | | |
| | exon_11_nc.4; | | | |
| | exon_11_nc.5; | | | |
| | exon_11_nc.6; | | | |
| | exon_11_nc.7; | | | |
| | exon_11_nc.8 | | | |
| ZNF644_201 (Ensembl) | exon_01_nc.4; | Ensembl_ENST000003 | 2617 | UniProt |
| | exon_01_nc.5; | 37393.10_ZNF644- | | Q9H582-1 |
| | exon_01_nc.6; | 201_cdna_protein_ | | (SEQ ID NO: |
| | exon_05_nc.1; | coding | | 2642) |
| | exon_05_c.1/nc.2; | | | |
| | exon_05_c.2/nc.3; | | | |
| | exon_07_c.1/nc.1; | | | |
| | exon_07_c.1/; | | | |
| | exon_07_c.1/nc.2; | | | |
| | exon_07_c.2; exon_08_c; | | | |
| | exon_08_c; exon_08_c/nc; | | | |
| | exon_08_c; | | | |
| | exon_10_c.1/nc.2; | | | |
| | exon_11_c.1/nc.1; | | | |
| | exon_11_nc.2; | | | |
| | exon_11_nc.3; | | | |
| | exon_11_nc.4; | | | |
| | exon_11_nc.5; | | | |
| | exon_11_nc.6; | | | |
| | exon_11_nc.7 | | | |
| ZNF644_202 (Ensembl) | exon_03_nc.3; | Ensembl_ENST000003 | 2618 | UniProt |
| | exon_05_nc.1; | 47275.9_ZNF644- | | Q9H582-3 |
| | exon_05_c.1/nc.2; | 202_cdna_protein_ | | (SEQ ID NO: |
| | exon_05_c.2/nc.3; | coding | | 2643) |
| | exon_10_c.1/nc.2; | | | |
| | exon_11_c.1/nc.1; | | | |
| | exon_11_nc.2; | | | |
| | exon_11_nc.3; | | | |
| | exon_11_nc.4; | | | |
| | exon_11_nc.5; | | | |
| | exon_11_nc.6; | | | |
| | exon_11_nc.7 | | | |
| ZNF644_203 (Ensembl) | exon_01_nc.1; | Ensembl_ENST000003 | 2619 | UniProt |
| | exon_01_nc.2; | 61321.5_ZNF644- | | Q9H582-3 |
| | exon_01_nc.3; | 203_cdna_protein_ | | (SEQ ID NO: |
| | exon_01_nc.4; | coding | | 2643) |
| | exon_01_nc.5; | | | |
| | exon_01_nc.6; | | | |
| | exon_05_nc.1; | | | |
| | exon_05_c.1/nc.2; | | | |
| | exon_05_c.2/nc.3; | | | |
| | exon_10_c.1/nc.2; | | | |
| | exon_11_c.1/nc.1; | | | |
| | exon_11_nc.2; | | | |
| | exon_11_nc.3; | | | |
| | exon_11_nc.4; | | | |
| | exon_11_nc.5 | | | |
| ZNF644_204 (Ensembl) | exon_03_nc.2; | Ensembl_ENST000003 | 2620 | UniProt |
| | exon_03_nc.3; | 70440.5_ZNF644- | | Q9H582-1 |
| | exon_05_nc.1; | 204_cdna_protein_ | | (SEQ ID NO: |
| | exon_05_c.1/nc.2; | coding | | 2642) |
| | exon_05_c.2/nc.3; | | | |
| | exon_07_c.1/nc.1; | | | |
| | exon_07_c.1/; | | | |
| | exon_07_c.1/nc.2; | | | |
| | exon_07_c.2; exon_08_c; | | | |
| | exon_08_c; exon_08_c/nc; | | | |
| | exon_08_c; | | | |
| | exon_10_c.1/nc.2; | | | |
| | exon_11_c.1/nc.1; | | | |
| | exon_11_nc.2; | | | |
| | exon_11_nc.3; | | | |
| | exon_11_nc.4; | | | |
| | exon_11_nc.5; | | | |
| | exon_11_nc.6; | | | |
| | exon_11_nc.7; | | | |
| | exon_11_nc.8; | | | |
| | exon_11_nc.9 | | | |
| ZNF644_205 | exon_01_nc.6; | Ensembl_ENST000004 | 2621 | — |
| (Ensembl)_nc | exon_05_nc.1; | 67231.5_ZNF644- | | |
| | exon_05_c.1/nc.2; | 205_cdna_processed_ | | |
| | exon_05_c.2/nc.3; | transcript | | |
| | exon_06_nc.1; | | | |
| | exon_10_c.1/nc.2; | | | |
| | exon_11_c.1/nc.1; | | | |
| | exon_11_nc.2; | | | |
| | exon_11_nc.3; | | | |
| | exon_11_nc.4 | | | |
| ZNF644_206 | exon_05_nc.1; | Ensembl_ENST000004 | 2622 | — |
| (Ensembl)_nc | exon_05_c.1/nc.2; | 74405.1_ZNF644- | | |
| | exon_05_c.2/nc.3; | 206_cdna_processed_ | | |
| | exon_06_nc.1; | transcript | | |
| | exon_06_nc.2 | | | |
| ZNF644_207 | exon_09_nc; | Ensembl_ENST000004 | 2623 | — |
| (Ensembl)_nc | exon_10_c.1/nc.2; | 79798.1_ZNF644- | | |
| | exon_11_c.1/nc.1; | 207_cdna_processed_ | | |
| | exon_11_nc.2; | transcript | | |
| | exon_11_nc.3 | | | |
| ZNF644_208 | exon_02_nc; exon_04_nc.1 | Ensembl_ENST000004 | 2624 | — |
| (Ensembl)_nc | | 82467.1_ZNF644- | | |
| | | 208_cdna_processed_ | | |
| | | transcript | | |
| ZNF644_209 | exon_10_nc.1; | Ensembl_ENST000004 | 2625 | — |
| (Ensembl)_nc | exon_10_c.1/nc.2; | 82709.1_ZNF644- | | |
| | exon_11_c.1/nc.1; | 209_cdna_processed_ | | |
| | exon_11_nc.2 | transcript | | |
| ZNF644_210 | exon_01_nc.2; | Ensembl_ENST000004 | 2626 | — |
| (Ensembl)_nc | exon_01_nc.3; | 95966.1_ZNF644- | | |
| | exon_01_nc.4; | 210_cdna_processed_ | | |
| | exon_01_nc.5; | transcript | | |
| | exon_01_nc.6; | | | |
| | exon_04_nc.1; | | | |
| | exon_04_nc.2 | | | |
| ZNF644_211 | exon_01_nc.3; | Ensembl_ENST000004 | 2627 | — |
| (Ensembl)_nc | exon_01_nc.4; | 98303.5_ZNF644- | | |
| | exon_01_nc.5; | 211_cdna_processed_ | | |
| | exon_01_nc.6; | transcript | | |
| | exon_05_nc.1; | | | |
| | exon_05_c.1/nc.2; | | | |
| | exon_05_c.2/nc.3; | | | |
| | exon_07_c.1/nc.1 | | | |
| ZNF644_212 (Ensembl) | exon_07_c.1/nc.2; | Ensembl_ENST000006 | 2628 | UniProt |
| | exon_07_c.2; exon_08_c; | 21077.1_ZNF644- | | A0A087WZL9-1 |
| | exon_08_c/nc | 212_cdna_protein_ | | (SEQ ID NO: |
| | | coding | | 2644) |

[0202] Accordingly, isoforms of ZNF644 protein have the amino acid sequences of SEQ ID NO: 2642 (UniProt Q91H582-1), SEQ ID NO: 2643 (UniProt Q9H-582-3), or SEQ ID NO: 2644 (UniProt AOA087WZL9-1).

[0203] As used herein, a human ZNF644 protein also encompasses proteins that have over its full length at least about 70%, 71%, 72%, 73%, 74%, 75%, 76%, 77%, 78%, 79%, 80%, 81%, 82%, 83%, 84%, 85%, 86%, 87%, 88%, 89%, 90%, 91%, 92%, 93%, 94%, 95%, 96%, 97%, 98%, 99% or 100% sequence identity with ZNF644 isoform disclosed herein, wherein such proteins still have at least one of the functions of ZNF644.

[0204] The term “complementary” as used in connection with nucleic acid, refers to the pairing of bases, A with T or U, and G with C. The term complementary refers to nucleic acid molecules that are completely complementary, that is, form A to T or U pairs and G to C pairs across the entire reference sequence, as well as molecules that are at least 80%, 85%, 90%, 95%, 99% complementary.

[0205] The terms “hematopoietic stem and progenitor cell” or “HSPC” are used interchangeably, and refer to a population of cells comprising both hematopoietic stem cells (“HSCs”) and hematopoietic progenitor cells (“HPCs”). Such cells are characterized, for example, as CD34+. In exemplary embodiments, HSPCs are isolated from bone marrow. In other exemplary embodiments, HSPCs are isolated from peripheral blood. In other exemplary embodiments, HSPCs are isolated from umbilical cord blood. In an embodiment, HSPCs are characterized as CD34+/CD38−/CD90+/CD45RA−. In embodiments, the HSPCs are characterized as CD34+/CD90+/CD49f+ cells. In embodiments, the HSPCs are characterized as CD34+ cells. In embodiments, the HSPC s are characterized as CD34+/CD90+ cells. In embodiments, the HSPCs are characterized as CD34+/CD90+/CD45RA− cells.

[0206] “Stem cell expander” as used herein refers to a compound which causes cells, e.g., HSPCs, HSCs and/or HPCs to proliferate, e.g., increase in number, at a faster rate relative to the same cell types absent said agent. In one exemplary aspect, the stem cell expander is an antagonist of the aryl hydrocarbon receptor pathway. Additional examples of stem cell expanders are provided below. In embodiments, the proliferation, e.g., increase in number, is accomplished ex vivo.

[0207] “Engraftment” or “engraft” refers to the incorporation of a cell or tissue, e.g., a population of HSPCs, into the body of a recipient, e.g., a mammal or human subject. In one example, engraftment includes the growth, expansion and/or differentiation of the engrafted cells in the recipient. In an example, engraftment of HSPCs includes the differentiation and growth of said HSPCs into erythroid cells within the body of the recipient.

[0208] The term “Hematopoietic progenitor cells” (HPCs) as used herein refers to primitive hematopoietic cells that have a limited capacity for self-renewal and the potential for multilineage differentiation (e.g., myeloid, lymphoid), mono-lineage differentiation (e.g., myeloid or lymphoid) or cell-type restricted differentiation (e.g., erythroid progenitor) depending on placement within the hematopoietic hierarchy (Doulatov et al., Cell Stem Cell 2012).

[0209] “Hematopoietic stem cells” (HSCs) as used herein refer to immature blood cells having the capacity to self-renew and to differentiate into more mature blood cells comprising granulocytes (e.g., promyelocytes, neutrophils, eosinophils, basophils), erythrocytes (e.g., reticulocytes, erythrocytes), thrombocytes (e.g., megakaryoblasts, platelet producing megakaryocytes, platelets), and monocytes (e.g., monocytes, macrophages). HSCs are interchangeably described as stem cells throughout the specification. It is known in the art that such cells may or may not include CD34+ cells. CD34+ cells are immature cells that express the CD34 cell surface marker. CD34+ cells are believed to include a subpopulation of cells with the stem cell properties defined above. It is well known in the art that HSCs are multipotent cells that can give rise to primitive progenitor cells (e.g., multipotent progenitor cells) and/or progenitor cells committed to specific hematopoietic lineages (e.g., lymphoid progenitor cells). The stem cells committed to specific hematopoietic lineages may be of T cell lineage, B cell lineage, dendritic cell lineage, Langerhans cell lineage and/or lymphoid tissue-specific macrophage cell lineage. In addition, HSCs also refer to long term HSC (LT-HSC) and short term HSC (ST-HSC). ST-HSCs are more active and more proliferative than LT-HSCs. However, LT-HSC have unlimited self-renewal (i.e., they survive throughout adulthood), whereas ST-HSC have limited self-renewal (i.e., they survive for only a limited period of time). Any of these HSCs can be used in any of the methods described herein. Optionally, ST-HSCs are useful because they are highly proliferative and thus, quickly increase the number of HSCs and their progeny. Hematopoietic stem cells are optionally obtained from blood products. A blood product includes a product obtained from the body or an organ of the body containing cells of hematopoietic origin. Such sources include un-fractionated bone marrow, umbilical cord, peripheral blood (e.g., mobilized peripheral blood, e.g., mobilized with a mobilization agent such as G-CSF or Plerixafor® (AMD3100), or a combination of G-CSF and Plerixafor® (AMD3100)), liver, thymus, lymph and spleen. All of the aforementioned crude or un-fractionated blood products can be enriched for cells having hematopoietic stem cell characteristics in ways known to those of skill in the art. In an embodiment, HSCs are characterized as CD34+/CD38−/CD90+/CD45RA−. In embodiments, the HSCs are characterized as CD34+/CD90+/CD49f+ cells. In embodiments, the HSCs are characterized as CD34+ cells. In embodiments, the HSCs are characterized as CD34+/CD90+ cells. In embodiments, the HSCs are characterized as CD34+/CD90+/CD45RA− cells.

[0210] “Expansion” or “Expand” in the context of cells refers to an increase in the number of a characteristic cell type, or cell types, from an initial cell population of cells, which may or may not be identical. The initial cells used for expansion may not be the same as the cells generated from expansion.

[0211] “Cell population” refers to eukaryotic mammalian, preferably human, cells isolated from biological sources, for example, blood product or tissues and derived from more than one cell.

[0212] “Enriched” when used in the context of cell population refers to a cell population selected based on the presence of one or more markers, for example, CD34+.

[0213] The term “CD34+ cells” refers to cells that express at their surface CD34 marker. CD34+ cells can be detected and counted using for example flow cytometry and fluorescently labeled anti-CD34 antibodies.

[0214] “Enriched in CD34+ cells” means that a cell population has been selected based on the presence of CD34 marker. Accordingly, the percentage of CD34+ cells in the cell population after selection method is higher than the percentage of CD34+ cells in the initial cell population before selecting step based on CD34 markers. For example, CD34+ cells may represent at least 50%, 60%, 70%, 80% or at least 90% of the cells in a cell population enriched in CD34+ cells.

[0215] The terms “F cell” and “F-cell” refer to cells, usually erythrocytes (e.g., red blood cells) which contain and/or produce (e.g., express) fetal hemoglobin. For example, an F-cell is a cell that contains or produces detectible levels of fetal hemoglobin. For example, an F-cell is a cell that contains or produces at least 5 picograms of fetal hemoglobin. In another example, an F-cell is a cell that contains or produces at least 6 picograms of fetal hemoglobin. In another example, an F-cell is a cell that contains or produces at least 7 picograms of fetal hemoglobin. In another example, an F-cell is a cell that contains or produces at least 8 picograms of fetal hemoglobin. In another example, an F-cell is a cell that contains or produces at least 9 picograms of fetal hemoglobin. In another example, an F-cell is a cell that contains or produces at least 10 picograms of fetal hemoglobin. Levels of fetal hemoglobin may be measured using an assay described herein or by other method known in the art, for example, flow cytometry using an anti-fetal hemoglobin detection reagent, high performance liquid chromatography, mass spectrometry, or enzyme-linked immunoabsorbent assay.

[0216] An “inhibitor” is a siRNA (e.g., shRNA, miRNA, snoRNA), gRNA, compound or small molecule that inhibits cellular function (e.g., replication) e.g., by binding, partially or totally blocking stimulation, decrease, prevent, or delay activation, or inactivate, desensitize, or down-regulate signal transduction, gene expression or enzymatic activity necessary for protein activity. A “ZNF644 inhibitor” refers to a substance that results in a detectably lower expression of ZNF644 gene or ZNF644 protein or lower activity level of ZNF644 proteins as compared to those levels without such substance. In some embodiments, a ZNF644 inhibitor is a small molecule compound (e.g., a small molecule compound that can target ZNF644 for degradation). In some embodiments, a ZNF644 inhibitor is an anti-ZNF644 shRNA. In some embodiments, a ZNF644 inhibitor is an anti-ZNF644 siRNA. In some embodiments, a ZNF644 inhibitor is an anti-ZNF644 ASO. In some embodiments, a ZNF644 inhibitor is an anti-ZNF644 AMO. In some embodiments, a ZNF644 inhibitor is an anti-ZNF644 antisense nucleic acid. In some embodiments, a ZNF644 inhibitor is a composition or a cell or a population of cells (that comprises gRNA molecules described herein) described herein.

[0217] An “antisense nucleic acid” as referred to herein is a nucleic acid (e.g. DNA or RNA molecule) that is complementary to at least a portion of a specific target nucleic acid (e.g. an mRNA translatable into a protein) and is capable of reducing transcription of the target nucleic acid (e.g. mRNA from DNA) or reducing the translation of the target nucleic acid (e.g. mRNA) or altering transcript splicing (e.g. single stranded morpholino oligo). See, e.g., Weintraub, Scientific American, 262:40 (1990). Typically, synthetic antisense nucleic acids (e.g. oligonucleotides) are generally between 15 and 25 bases in length. Thus, antisense nucleic acids are capable of hybridizing to (e.g. selectively hybridizing to) a target nucleic acid (e.g. target mRNA). In embodiments, the antisense nucleic acid hybridizes to the target nucleic acid sequence (e.g. mRNA) under stringent hybridization conditions. In embodiments, the antisense nucleic acid hybridizes to the target nucleic acid (e.g. mRNA) under moderately stringent hybridization conditions. Antisense nucleic acids may comprise naturally occurring nucleotides or modified nucleotides such as, e.g., phosphorothioate, methylphosphonate, and -anomeric sugar-phosphate, backbone modified nucleotides.

[0218] In the cell, the antisense nucleic acids hybridize to the corresponding mRNA, forming a double-stranded molecule. The antisense nucleic acids interfere with the translation of the mRNA, since the cell will not translate an mRNA that is double-stranded. The use of antisense methods to inhibit the in vitro translation of genes is well known in the art (Marcus-Sakura, Anal. Biochem., 172:289, (1988)). Further, antisense molecules which bind directly to the DNA may be used. Antisense nucleic acids may be single or double stranded nucleic acids. Non-limiting examples of antisense nucleic acids include siRNAs (including their derivatives or pre-cursors, such as nucleotide analogs), short hairpin RNAs (shRNA), micro RNAs (miRNA), saRNAs (small activating RNAs) and small nucleolar RNAs (snoRNA) or certain of their derivatives or precursors.

[0219] An “siRNA” refers to a nucleic acid that forms a double stranded RNA, which double stranded RNA has the ability to reduce or inhibit expression of a gene or target gene when the siRNA is present (e.g. expressed) in the same cell as the gene or target gene. The siRNA is typically about 5 to about 100 nucleotides in length, more typically about 10 to about 50 nucleotides in length, more typically about 15 to about 30 nucleotides in length, most typically about 20-30 base nucleotides, or about 20-25 or about 24-29 nucleotides in length, e.g., 20, 21, 22, 23, 24, 25, 26, 27, 28, 29, or 30 nucleotides in length. siRNA molecules and methods of generating them are described in, e.g., Bass, 2001, Nature, 411, 428-429; Elbashir et al., 2001, Nature, 411, 494-498; WO 00/44895; WO 01/36646; WO 99/32619; WO 00/01846; WO 01/29058; WO 99/07409; and WO 00/44914. A DNA molecule that transcribes dsRNA or siRNA (for instance, as a hairpin duplex) also provides RNAi. DNA molecules for transcribing dsRNA are disclosed in U.S. Pat. No. 6,573,099, and in U.S. Patent Application Publication Nos. 2002/0160393 and 2003/0027783, and Tuschl and Borkhardt, Molecular Interventions, 2:158 (2002).

[0220] Of the double stranded RNA of an siRNA, the strand that is at least partially complementary to at least a portion of a specific target nucleic acid (e.g. a target nucleic acid sequence), such as an mRNA molecule (e.g. a target mRNA molecule), is called the antisense (or guide strand; and the other strand is called sense (or passenger strand). The passenger strand is degraded and the guide strand is incorporated into the RNA-induced silencing complex (RISC).

[0221] A short hairpin RNA or small hairpin RNA (shRNA/Hairpin Vector) is an artificial RNA molecule with a tight hairpin turn that can be used to silence target gene expression via RNA interference (RNAi).

[0222] Antisense oligonucleotides (ASOs) are single strands of DNA or RNA that are complementary to a chosen sequence. In the case of antisense RNA they prevent protein translation of certain messenger RNA strands by binding to them, in a process called hybridization. Antisense oligonucleotides can be used to target a specific, complementary (coding or non-coding) RNA. If binding takes place this hybrid can be degraded by the enzyme RNase H.

[0223] Anti-miRNA Oligonucleotides (also known as AMOs) refer to synthetically designed molecules (e.g., oligonucleotides) that are used to neutralize microRNA (miRNA) function in cells for desired responses.

[0224] The term “miRNA” is used in accordance with its plain ordinary meaning and refers to a small non-coding RNA molecule capable of post-transcriptionally regulating gene expression. In one embodiment, a miRNA is a nucleic acid that has substantial or complete identity to a target gene. In embodiments, the miRNA inhibits gene expression by interacting with a complementary cellular mRNA thereby interfering with the expression of the complementary mRNA. Typically, the miRNA is at least about 15-50 nucleotides in length (e.g., each complementary sequence of the miRNA is 15-50 nucleotides in length, and the miRNA is about 15-50 base pairs in length). In other embodiments, the length is 20-30 base nucleotides, preferably about 20-25 or about 24-29 nucleotides in length, e.g., 20, 21, 22, 23, 24, 25, 26, 27, 28, 29, or 30 nucleotides in length.

[0225] “Nucleic acid” refers to deoxyribonucleotides or ribonucleotides and polymers thereof in either single-, double- or multiple-stranded form, or complements thereof. The term “polynucleotide” or “oligonucleotide” refers to a linear sequence of nucleotides. The term “nucleotide” typically refers to a single unit of a polynucleotide, i.e., a monomer. Nucleotides can be ribonucleotides, deoxyribonucleotides, or modified versions thereof. Examples of polynucleotides contemplated herein include single and double stranded DNA, single and double stranded RNA (including siRNA), and hybrid molecules having mixtures of single and double stranded DNA and RNA. Nucleic acids can be linear or branched. For example, nucleic acids can be a linear chain of nucleotides or the nucleic acids can be branched, e.g., such that the nucleic acids comprise one or more arms or branches of nucleotides. Optionally, the branched nucleic acids are repetitively branched to form higher ordered structures such as dendrimers and the like.

[0226] The terms also encompass nucleic acids containing known nucleotide analogs or modified backbone residues or linkages, which are synthetic, naturally occurring, and non-naturally occurring, which have similar binding properties as the reference nucleic acid, and which are metabolized in a manner similar to the reference nucleotides. Examples of such analogs include, without limitation, phosphodiester derivatives including, e.g., phosphoramidate, phosphorodiamidate, phosphorothioate (also known as phosphothioate), phosphorodithioate, phosphonocarboxylic acids, phosphonocarboxylates, phosphonoacetic acid, phosphonoformicacid, methyl phosphonate, boron phosphonate, or O-methylphosphoroamidite linkages (see Eckstein, Oligonucleotides and Analogues: A Practical Approach, Oxford University Press); and peptide nucleic acid backbones and linkages. Other analog nucleic acids include those with positive backbones; non-ionic backbones, modified sugars, and non-ribose backbones (e.g. phosphorodiamidate morpholino oligos or locked nucleic acids (LNA)), including those described in U.S. Pat. Nos. 5,235,033 and 5,034,506, and Chapters 6 and 7, ASC Symposium Series 580, Carbohydrate Modifications in Antisense Research, Sanghui & Cook, eds. Nucleic acids containing one or more carbocyclic sugars are also included within one definition of nucleic acids. Modifications of the ribose-phosphate backbone may be done for a variety of reasons, e.g., to increase the stability and half-life of such molecules in physiological environments or as probes on a biochip. Mixtures of naturally occurring nucleic acids and analogs can be made; alternatively, mixtures of different nucleic acid analogs, and mixtures of naturally occurring nucleic acids and analogs may be made. In embodiments, the internucleotide linkages in DNA are phosphodiester, phosphodiester derivatives, or a combination of both.

[0227] Unless otherwise stated, all genome or chromosome coordinates are according to hg38.

[0228] The gRNA molecules, compositions and methods described herein relate to genome editing in eukaryotic cells using the CRISPR/Cas9 system. In particular, the gRNA molecules, compositions and methods described herein relate to regulation of globin levels and are useful, for example, in regulating expression and production of globin genes and protein. The gRNA molecules, compositions and methods can be useful in the treatment of hemoglobinopathies.

I. gRNA Molecules

[0229] A gRNA molecule may have a number of domains, as described more fully below, however, a gRNA molecule typically comprises at least a crRNA domain (comprising a targeting domain) and a tracr. The gRNA molecules of the invention, used as a component of a CRISPR system, are useful for modifying (e.g., modifying the sequence) DNA at or near a target site. Such modifications include deletions and or insertions that result in, for example, reduced or eliminated expression of a functional product of the gene comprising the target site. These uses, and additional uses, are described more fully below.

[0230] In an embodiment, a unimolecular, or sgRNA comprises, preferably from 5′ to 3′: a crRNA (which contains a targeting domain complementary to a target sequence and a region that forms part of a flagpole (i.e., a crRNA flagpole region)); a loop; and a tracr (which contains a domain complementary to the crRNA flagpole region, and a domain which additionally binds a nuclease or other effector molecule, e.g., a Cas molecule, e.g., aCas9 molecule), and may take the following format (from 5′ to 3′):
[0231] [targeting domain]-[crRNA flagpole region]-[optional first flagpole extension]-[loop]-[optional first tracr extension]-[tracr flagpole region]-[tracr nuclease binding domain].

[0232] In embodiments, the tracr nuclease binding domain binds to a Cas protein, e.g., a Cas9 protein. In an embodiment, a bimolecular, or dgRNA comprises two polynucleotides; the first, preferably from 5′ to 3′: a crRNA (which contains a targeting domain complementary to a target sequence and a region that forms part of a flagpole; and the second, preferably from 5′ to 3′: a tracr (which contains a domain complementary to the crRNA flagpole region, and a domain which additionally binds a nuclease or other effector molecule, e.g., a Cas molecule, e.g., Cas9 molecule), and may take the following format (from 5′ to 3′):
[0233] Polynucleotide 1 (crRNA): [targeting domain]-[crRNA flagpole region]-[optional first flagpole extension]-[optional second flagpole extension]
[0234] Polynucleotide 2 (tracr): [optional first tracr extension]-[tracr flagpole region]-[tracr nuclease binding domain]

[0235] In embodiments, the tracr nuclease binding domain binds to a Cas protein, e.g., a Cas9 protein.

[0236] In some aspects, the targeting domain comprises or consists of a targeting domain sequence described herein, e.g., a targeting domain described in Table 1-Table 3, or a targeting domain comprising or consisting of 17, 18, 19, or 20 (preferably 20) consecutive nucleotides of a targeting domain sequence described in Table 1-Table 3.

[0237] In some aspects, the flagpole, e.g., the crRNA flagpole region, comprises, from 5′ to 3′: GUUUUAGAGCUA (SEQ ID NO: 3110).

[0238] In some aspects, the flagpole, e.g., the crRNA flagpole region, comprises, from 5′ to 3′: GUUUAAGAGCUA (SEQ ID NO: 3111).

[0239] In some aspects the loop comprises, from 5′ to 3′: GAAA (SEQ ID NO: 3114).

[0240] In some aspects the tracr comprises, from 5′ to 3′: UAGCAAGUUAAAAUAAGGCUAGUCCGUUAUCAACUUGAAAAAGUGGCACCGAGUCGG UGC (SEQ ID NO: 3115) and is preferably used in a gRNA molecule comprising SEQ ID NO: 3110.

[0241] In some aspects the tracr comprises, from 5′ to 3′: UAGCAAGUUUAAAUAAGGCUAGUCCGUUAUCAACUUGAAAAAGUGGCACCGAGUCGG UGC (SEQ ID NO: 3116) and is preferably used in a gRNA molecule comprising SEQ ID NO: 3111.

[0242] In some aspects, the gRNA may also comprise, at the 3′ end, additional U nucleic acids. For example the gRNA may comprise an additional 1, 2, 3, 4, 5, 6, 7, 8, 9, or 10 U nucleic acids (SEQ ID NO: 3177) at the 3′ end. In an embodiment, the gRNA comprises an additional 4 U nucleic acids at the 3′ end. In the case of dgRNA, one or more of the polynucleotides of the dgRNA (e.g., the polynucleotide comprising the targeting domain and the polynucleotide comprising the tracr) may comprise, at the 3′ end, additional U nucleic acids. For example, the case of dgRNA, one or more of the polynucleotides of the dgRNA (e.g., the polynucleotide comprising the targeting domain and the polynucleotide comprising the tracr) may comprise an additional 1, 2, 3, 4, 5, 6, 7, 8, 9, or 10 U nucleic acids (SEQ ID NO: 3177) at the 3′ end. In an embodiment, in the case of dgRNA, one or more of the polynucleotides of the dgRNA (e.g., the polynucleotide comprising the targeting domain and the polynucleotide comprising the tracr) comprises an additional 4 U nucleic acids at the 3′ end. In an embodiment of a dgRNA, only the polynucleotide comprising the tracr comprises the additional U nucleic acid(s), e.g., 4 U nucleic acids. In an embodiment of a dgRNA, only the polynucleotide comprising the targeting domain comprises the additional U nucleic acid(s). In an embodiment of a dgRNA, both the polynucleotide comprising the targeting domain and the polynucleotide comprising the tracr comprise the additional U nucleic acids, e.g., 4 U nucleic acids.

[0243] In some aspects, the gRNA may also comprise, at the 3′ end, additional A nucleic acids. For example the gRNA may comprise an additional 1, 2, 3, 4, 5, 6, 7, 8, 9, or 10 A nucleic acids (SEQ ID NO: 3178) at the 3′ end. In an embodiment, the gRNA comprises an additional 4 A nucleic acids at the 3′ end. In the case of dgRNA, one or more of the polynucleotides of the dgRNA (e.g., the polynucleotide comprising the targeting domain and the polynucleotide comprising the tracr) may comprise, at the 3′ end, additional A nucleic acids. For example, the case of dgRNA, one or more of the polynucleotides of the dgRNA (e.g., the polynucleotide comprising the targeting domain and the polynucleotide comprising the tracr) may comprise an additional 1, 2, 3, 4, 5, 6, 7, 8, 9, or 10 A nucleic acids (SEQ ID NO: 3178) at the 3′ end. In an embodiment, in the case of dgRNA, one or more of the polynucleotides of the dgRNA (e.g., the polynucleotide comprising the targeting domain and the polynucleotide comprising the tracr) comprises an additional 4 A nucleic acids at the 3′ end. In an embodiment of a dgRNA, only the polynucleotide comprising the tracr comprises the additional A nucleic acid(s), e.g., 4 A nucleic acids. In an embodiment of a dgRNA, only the polynucleotide comprising the targeting domain comprises the additional A nucleic acid(s). In an embodiment of a dgRNA, both the polynucleotide comprising the targeting domain and the polynucleotide comprising the tracr comprise the additional U nucleic acids, e.g., 4 A nucleic acids.

[0244] In embodiments, one or more of the polynucleotides of the gRNA molecule may comprise a cap at the 5′ end.

[0245] In an embodiment, a unimolecular, or sgRNA comprises, preferably from 5′ to 3′: a crRNA (which contains a targeting domain complementary to a target sequence; a crRNA flagpole region; first flagpole extension; a loop; a first tracr extension (which contains a domain complementary to at least a portion of the first flagpole extension); and a tracr (which contains a domain complementary to the crRNA flagpole region, and a domain which additionally binds a Cas9 molecule). In some aspects, the targeting domain comprises a targeting domain sequence described herein, e.g., a targeting domain described in Table 1-Table 3, or a targeting domain comprising or consisting of 17, 18, 19, or 20 (preferably 20) consecutive nucleotides of a targeting domain sequence described in Table 1-Table 3, for example the 3′ 17, 18, 19, or 20 (preferably 20) consecutive nucleotides of a targeting domain sequence described in Table 1-Table 3.

[0246] In aspects comprising a first flagpole extension and/or a first tracr extension, the flagpole, loop and tracr sequences may be as described above. In general any first flagpole extension and first tracr extension may be employed, provided that they are complementary. In embodiments, the first flagpole extension and first tracr extension consist of 3, 4, 5, 6, 7, 8, 9, 10 or more complementary nucleotides.

[0247] In some aspects, the first flagpole extension comprises, from 5′ to 3′: UGCUG (SEQ ID NO: 3112). In some aspects, the first flagpole extension consists of SEQ ID NO: 3112.

[0248] In some aspects, the first tracr extension comprises, from 5′ to 3′: CAGCA (SEQ ID NO: 3117). In some aspects, the first tracr extension consists of SEQ ID NO: 3117.

[0249] In an embodiment, a dgRNA comprises two nucleic acid molecules. In some aspects, the dgRNA comprises a first nucleic acid which contains, preferably from 5′ to 3′: a targeting domain complementary to a target sequence; a crRNA flagpole region; optionally a first flagpole extension; and, optionally, a second flagpole extension; and a second nucleic acid (which may be referred to herein as a tracr), and comprises at least a domain which binds a Cas molecule, e.g., a Cas9 molecule) comprising preferably from 5′ to 3′: optionally a first tracr extension; and a tracr (which contains a domain complementary to the crRNA flagpole region, and a domain which additionally binds a Cas, e.g., Cas9, molecule). The second nucleic acid may additionally comprise, at the 3′ end (e.g., 3′ to the tracr) additional U nucleic acids. For example the tracr may comprise an additional 1, 2, 3, 4, 5, 6, 7, 8, 9, or 10 U nucleic acids (SEQ ID NO: 3177) at the 3′ end (e.g., 3′ to the tracr). The second nucleic acid may additionally or alternately comprise, at the 3′ end (e.g., 3′ to the tracr) additional A nucleic acids. For example the tracr may comprise an additional 1, 2, 3, 4, 5, 6, 7, 8, 9, or 10 A nucleic acids (SEQ ID NO: 3178) at the 3′ end (e.g., 3′ to the tracr). In some aspects, the targeting domain comprises a targeting domain sequence described herein, e.g., a targeting domain described in Table 1-Table 3, or a targeting domain comprising or consisting of 17, 18, 19, or 20 (preferably 20) consecutive nucleotides of a targeting domain sequence described in Table 1-Table 3.

[0250] In aspects involving a dgRNA, the crRNA flagpole region, optional first flagpole extension, optional first tracr extension and tracr sequences may be as described above.

[0251] In some aspects, the optional second flagpole extension comprises, from 5′ to 3′: UUUUG (SEQ ID NO: 3113).

[0252] In embodiments, the 3′ 1, 2, 3, 4, or 5 nucleotides, the 5′ 1, 2, 3, 4, or 5 nucleotides, or both the 3′ and 5′ 1, 2, 3, 4, or 5 nucleotides of the gRNA molecule (and in the case of a dgRNA molecule, the polynucleotide comprising the targeting domain and/or the polynucleotide comprising the tracr) are modified nucleic acids, as described more fully in section XIII, below.

[0253] The domains are discussed briefly below:

### 1) The Targeting Domain:

[0254] Guidance on the selection of targeting domains can be found, e.g., in Fu Y et al. NAT BIOTECHNOL 2014 (doi: 10.1038/nbt.2808) and Sternberg S H et al. NATURE 2014 (doi: 10.1038/nature13011).

[0255] The targeting domain comprises a nucleotide sequence that is complementary, e.g., at least 80, 85, 90, 95, or 99% complementary, e.g., fully complementary, to the target sequence on the target nucleic acid. The targeting domain is part of an RNA molecule and will therefore comprise the base uracil (U), while any DNA encoding the gRNA molecule will comprise the base thymine (T). While not wishing to be bound by theory, it is believed that the complementarity of the targeting domain with the target sequence contributes to specificity of the interaction of the gRNA molecule/Cas9 molecule complex with a target nucleic acid. It is understood that in a targeting domain and target sequence pair, the uracil bases in the targeting domain will pair with the adenine bases in the target sequence.

[0256] In an embodiment, the targeting domain is 5 to 50, e.g., 10 to 40, e.g., 10 to 30, e.g., 15 to 30, e.g., 15 to 25 nucleotides in length. In an embodiment, the targeting domain is 15, 16, 17, 18, 19, 20, 21, 22, 23, 24 or 25 nucleotides in length. In an embodiment, the targeting domain is 16 nucleotides in length. In an embodiment, the targeting domain is 17 nucleotides in length. In an embodiment, the targeting domain is 18 nucleotides in length. In an embodiment, the targeting domain is 19 nucleotides in length. In an embodiment, the targeting domain is 20 nucleotides in length. In embodiments, the aforementioned 16, 17, 18, 19, or 20 nucleotides comprise the 5′-16, 17, 18, 19, or 20 nucleotides from a targeting domain described in Table 1-Table 3. In embodiments, the aforementioned 16, 17, 18, 19, or 20 nucleotides comprise the 3′-16, 17, 18, 19, or 20 nucleotides from a targeting domain described in Table 1-Table 3.

[0257] Without being bound by theory, it is believed that the 8, 9, 10, 11 or 12 nucleic acids of the targeting domain disposed at the 3′ end of the targeting domain is important for targeting the target sequence, and may thus be referred to as the “core” region of the targeting domain. In an embodiment, the core domain is fully complementary with the target sequence.

[0258] The strand of the target nucleic acid with which the targeting domain is complementary is referred to herein as the target sequence. In some aspects, the target sequence is disposed on a chromosome, e.g., is a target within a gene. In some aspects the target sequence is disposed within an exon of a gene. In some aspects the target sequence is disposed within an intron of a gene. In some aspects, the target sequence comprises, or is proximal (e.g., within 10, 20, 30, 40, 50, 100, 200, 300, 400, 500, or 1000 nucleic acids) to a binding site of a regulatory element, e.g., a promoter or transcription factor binding site, of a gene of interest. Some or all of the nucleotides of the domain can have a modification, e.g., modification found in Section XIII herein.

2) crRNA Flagpole Region:

[0259] The flagpole contains portions from both the crRNA and the tracr. The crRNA flagpole region is complementary with a portion of the tracr, and in an embodiment, has sufficient complementarity to a portion of the tracr to form a duplexed region under at least some physiological conditions, for example, normal physiological conditions. In an embodiment, the crRNA flagpole region is 5 to 30 nucleotides in length. In an embodiment, the crRNA flagpole region is 5 to 25 nucleotides in length. The crRNA flagpole region can share homology with, or be derived from, a naturally occurring portion of the repeat sequence from a bacterial CRISPR array. In an embodiment, it has at least 50% homology with a crRNA flagpole region disclosed herein, e.g., an S. pyogenes, or S. thermophilus, crRNA flagpole region.

[0260] In an embodiment, the flagpole, e.g., the crRNA flagpole region, comprises SEQ ID NO: 3110. In an embodiment, the flagpole, e.g., the crRNA flagpole region, comprises sequence having at least 50%, 60%, 70%, 80%, 85%, 90%, 95% or 99% homology with SEQ ID NO: 3110. In an embodiment, the flagpole, e.g., the crRNA flagpole region, comprises at least 5, 6, 7, 8, 9, 10, or 11 nucleotides of SEQ ID NO: 3110. In an embodiment, the flagpole, e.g., the crRNA flagpole region, comprises SEQ ID NO: 3111. In an embodiment, the flagpole comprises sequence having at least 50%, 60%, 70%, 80%, 85%, 90%, 95% or 99% homology with SEQ ID NO: 3111. In an embodiment, the flagpole, e.g., the crRNA flagpole region, comprises at least 5, 6, 7, 8, 9, 10, or 11 nucleotides of SEQ ID NO: 3111.

[0261] Some or all of the nucleotides of the domain can have a modification, e.g., modification described in Section XIII herein.

### 3) First Flagpole Extension

[0262] When a tracr comprising a first tracr extension is used, the crRNA may comprise a first flagpole extension. In general any first flagpole extension and first tracr extension may be employed, provided that they are complementary. In embodiments, the first flagpole extension and first tracr extension consist of 3, 4, 5, 6, 7, 8, 9, 10 or more complementary nucleotides.

[0263] The first flagpole extension may comprise nucleotides that are complementary, e.g., 80%, 85%, 90%, 95% or 99%, e.g., fully complementary, with nucleotides of the first tracr extension. In some aspects, the first flagpole extension nucleotides that hybridize with complementary nucleotides of the first tracr extension are contiguous. In some aspects, the first flagpole extension nucleotides that hybridize with complementary nucleotides of the first tracr extension are discontinuous, e.g., comprises two or more regions of hybridization separated by nucleotides that do not base pair with nucleotides of the first tracr extension. In some aspects, the first flagpole extension comprises at least 2, 3, 4, 5, 6, 7, 8, 9, 10, 11, 12, 13, 14, 15, 16, 17, 18, 19, 20 or more nucleotides. In some aspects, the first flagpole extension comprises, from 5′ to 3′: UGCUG (SEQ ID NO: 3112). In some aspects, the first flagpole extension consists of SEQ ID NO: 3112. In some aspects the first flagpole extension comprises nucleic acid that is at least 80%, 85%, 90%, 95% or 99% homology to SEQ ID NO: 3112.

[0264] Some or all of the nucleotides of the first tracr extension can have a modification, e.g., modification found in Section XIII herein.

### 4) The Loop

[0265] A loop serves to link the crRNA flagpole region (or optionally the first flagpole extension, when present) with the tracr (or optionally the first tracr extension, when present) of a sgRNA. The loop can link the crRNA flagpole region and tracr covalently or non-covalently. In an embodiment, the linkage is covalent. In an embodiment, the loop covalently couples the crRNA flagpole region and tracr. In an embodiment, the loop covalently couples the first flagpole extension and the first tracr extension. In an embodiment, the loop is, or comprises, a covalent bond interposed between the crRNA flagpole region and the domain of the tracr which hybridizes to the crRNA flagpole region. Typically, the loop comprises one or more, e.g., 2, 3, 4, 5, 6, 7, 8, 9, or 10 nucleotides.

[0266] In dgRNA molecules the two molecules can be associated by virtue of the hybridization between at least a portion of the crRNA (e.g., the crRNA flagpole region) and at least a portion of the tracr (e.g., the domain of the tracr which is complementary to the crRNA flagpole region).

[0267] A wide variety of loops are suitable for use in sgRNAs. Loops can consist of a covalent bond, or be as short as one or a few nucleotides, e.g., 1, 2, 3, 4, or 5 nucleotides in length. In an embodiment, a loop is 2, 3, 4, 5, 6, 7, 8, 9, 10, 15, 20, or 25 or more nucleotides in length. In an embodiment, a loop is 2 to 50, 2 to 40, 2 to 30, 2 to 20, 2 to 10, or 2 to 5 nucleotides in length. In an embodiment, a loop shares homology with, or is derived from, a naturally occurring sequence. In an embodiment, the loop has at least 50% homology with a loop disclosed herein. In an embodiment, the loop comprises SEQ ID NO: 3114.

[0268] Some or all of the nucleotides of the domain can have a modification, e.g., modification described in Section XIII herein.

### 5) The Second Flagpole Extension

[0269] In an embodiment, a dgRNA can comprise additional sequence, 3′ to the crRNA flagpole region or, when present, the first flagpole extension, referred to herein as the second flagpole extension. In an embodiment, the second flagpole extension is, 2-10, 2-9, 2-8, 2-7, 2-6, 2-5, or 2-4 nucleotides in length. In an embodiment, the second flagpole extension is 2, 3, 4, 5, 6, 7, 8, 9, or 10 or more nucleotides in length. In an embodiment, the second flagpole extension comprises SEQ ID NO: 3113.

### 6) The Tracr:

[0270] The tracr is the nucleic acid sequence required for nuclease, e.g., Cas9, binding. Without being bound by theory, it is believed that each Cas9 species is associated with a particular tracr sequence. Tracr sequences are utilized in both sgRNA and in dgRNA systems. In an embodiment, the tracr comprises sequence from, or derived from, an S. pyogenes tracr. In some aspects, the tracr has a portion that hybridizes to the flagpole portion of the crRNA, e.g., has sufficient complementarity to the crRNA flagpole region to form a duplexed region under at least some physiological conditions (sometimes referred to herein as the tracr flagpole region or a tracr domain complementary to the crRNA flagpole region). In embodiments, the domain of the tracr that hybridizes with the crRNA flagpole region comprises at least 5, 6, 7, 8, 9, 10, 11, 12, 13, 14, 15, 16, 17, 18, 19, or 20 nucleotides that hybridize with complementary nucleotides of the crRNA flagpole region. In some aspects, the tracr nucleotides that hybridize with complementary nucleotides of the crRNA flagpole region are contiguous. In some aspects, the tracr nucleotides that hybridize with complementary nucleotides of the crRNA flagpole region are discontinuous, e.g., comprises two or more regions of hybridization separated by nucleotides that do not base pair with nucleotides of the crRNA flagpole region. In some aspects, the portion of the tracr that hybridizes to the crRNA flagpole region comprises, from 5′ to 3′: UAGCAAGUUAAAA (SEQ ID NO: 3119). In some aspects, the portion of the tracr that hybridizes to the crRNA flagpole region comprises, from 5′ to 3′: UAGCAAGUUUAAA (SEQ ID NO: 3120). In embodiments, the sequence that hybridizes with the crRNA flagpole region is disposed on the tracr 5′- to the sequence of the tracr that additionally binds a nuclease, e.g., a Cas molecule, e.g., a Cas9 molecule.

[0271] The tracr further comprises a domain that additionally binds to a nuclease, e.g., a Cas molecule, e.g., a Cas9 molecule. Without being bound by theory, it is believed that Cas9 from different species bind to different tracr sequences. In some aspects, the tracr comprises sequence that binds to a S. pyogenes Cas9 molecule. In some aspects, the tracr comprises sequence that binds to a Cas9 molecule disclosed herein. In some aspects, the domain that additionally binds a Cas9 molecule comprises, from 5′ to 3′: UAAGGCUAGUCCGUUAUCAACUUGAAAAAGUGGCACCGAGUCGGUGC (SEQ ID NO: 3121). In some aspects the domain that additionally binds a Cas9 molecule comprises, from 5′ to 3′: UAAGGCUAGUCCGUUAUCAACUUGAAAAAGUGGCACCGAGUCGGUGCUUUU (SEQ ID NO: 3122).

[0272] In some embodiments, the tracr comprises SEQ ID NO: 3115. In some embodiments, the tracr comprises SEQ ID NO: 3116.

[0273] Some or all of the nucleotides of the tracr can have a modification, e.g., modification found in Section XIII herein. In embodiments, the gRNA (e.g., the sgRNA or the tracr and/or crRNA of a dgRNA), e.g., any of the gRNA or gRNA components described above, comprises an inverted abasic residue at the 5′ end, the 3′ end or both the 5′ and 3′ end of the gRNA. In embodiments, the gRNA (e.g., the sgRNA or the tracr and/or crRNA of a dgRNA), e.g., any of the gRNA or gRNA components described above, comprises one or more phosphorothioate bonds between residues at the 5′ end of the polynucleotide, for example, a phosphrothioate bond between the first two 5′ residues, between each of the first three 5′ residues, between each of the first four 5′ residues, or between each of the first five 5′ residues. In embodiments, the gRNA or gRNA component may alternatively or additionally comprise one or more phosphorothioate bonds between residues at the 3′ end of the polynucleotide, for example, a phosphrothioate bond between the first two 3′ residues, between each of the first three 3′ residues, between each of the first four 3′ residues, orbetween each of the first five 3′ residues. In an embodiment, the gRNA (e.g., the sgRNA or the tracr and/or crRNA of a dgRNA), e.g., any of the gRNA or gRNA components described above, comprises a phosphorothioate bond between each of the first four 5′ residues (e.g., comprises, e.g., consists of, three phosphorothioate bonds at the 5′ end(s)), and a phosphorothioate bond between each of the first four 3′ residues (e.g., comprises, e.g., consists of, three phosphorothioate bonds at the 3′ end(s)). In an embodiment, any of the phosphorothioate modifications described above are combined with an inverted abasic residue at the 5′ end, the 3′ end, or both the 5′ and 3′ ends of the polynucleotide. In such embodiments, the inverted abasic nucleotide may be linked to the 5′ and/or 3′ nucleotide by a phosphate bond or a phosphorothioate bond. In embodiments, the gRNA (e.g., the sgRNA or the tracr and/or crRNA of a dgRNA), e.g., any of the gRNA or gRNA components described above, comprises one or more nucleotides that include a 2′ O-methyl modification. In embodiments, each of the first 1, 2, 3, or more of the 5′ residues comprise a 2′ O-methyl modification. In embodiments, each of the first 1, 2, 3, or more of the 3′ residues comprise a 2′ O-methyl modification. In embodiments, the 4^{th}-to-terminal, 3^{rd}-to-terminal, and 2nd-to-terminal 3′ residues comprise a 2′ O-methyl modification. In embodiments, each of the first 1, 2, 3 or more of the 5′ residues comprise a 2′ O-methyl modification, and each of the first 1, 2, 3 or more of the 3′ residues comprise a 2′ O-methyl modification. In an embodiment, each of the first 3 of the 5′ residues comprise a 2′ O-methyl modification, and each of the first 3 of the 3′ residues comprise a 2′ O-methyl modification. In embodiments, each of the first 3 of the 5′ residues comprise a 2′ O-methyl modification, and the 4^{th}-to-terminal, 3^{d}-to-terminal, and 2nd-to-terminal 3′ residues comprise a 2′ O-methyl modification. In embodiments, any of the 2′ O-methyl modifications, e.g., as described above, may be combined with one or more phosphorothioate modifications, e.g., as described above, and/or one or more inverted abasic modifications, e.g., as described above. In an embodiment, the gRNA (e.g., the sgRNA or the tracr and/or crRNA of a dgRNA), e.g., any of the gRNA or gRNA components described above, comprises, e.g., consists of, a phosphorothioate bond between each of the first four 5′ residues (e.g., comprises, e.g., consists of three phosphorothioate bonds at the 5′ end of the polynucleotide(s)), a phosphorothioate bond between each of the first four 3′ residues (e.g., comprises, e.g., consists of three phosphorothioate bonds at the 5′ end of the polynucleotide(s)), a 2′ O-methyl modification at each of the first three 5′ residues, and a 2′ O-methyl modification at each of the first three 3′ residues. In an embodiment, the gRNA (e.g., the sgRNA or the tracr and/or crRNA of a dgRNA), e.g., any of the gRNA or gRNA components described above, comprises, e.g., consists of, a phosphorothioate bond between each of the first four 5′ residues (e.g., comprises, e.g., consists of three phosphorothioate bonds at the 5′ end of the polynucleotide(s)), a phosphorothioate bond between each of the first four 3′ residues (e.g., comprises, e.g., consists of three phosphorothioate bonds at the 5′ end of the polynucleotide(s)), a 2′ O-methyl modification at each of the first three 5′ residues, and a 2′ O-methyl modification at each of the 4^{th}-to-terminal, 3^{rd}-to-terminal, and 2nd-to-terminal 3′ residues.

[0274] In an embodiment, the gRNA (e.g., the sgRNA or the tracr and/or crRNA of a dgRNA), e.g., any of the gRNA or gRNA components described above, comprises, e.g., consists of, a phosphorothioate bond between each of the first four 5′ residues (e.g., comprises, e.g., consists of three phosphorothioate bonds at the 5′ end of the polynucleotide(s)), a phosphorothioate bond between each of the first four 3′ residues (e.g., comprises, e.g., consists of three phosphorothioate bonds at the 5′ end of the polynucleotide(s)), a 2′ O-methyl modification at each of the first three 5′ residues, a 2′ O-methyl modification at each of the first three 3′ residues, and an additional inverted abasic residue at each of the 5′ and 3′ ends.

[0275] In an embodiment, the gRNA (e.g., the sgRNA or the tracr and/or crRNA of a dgRNA), e.g., any of the gRNA or gRNA components described above, comprises, e.g., consists of, a phosphorothioate bond between each of the first four 5′ residues (e.g., comprises, e.g., consists of three phosphorothioate bonds at the 5′ end of the polynucleotide(s)), a phosphorothioate bond between each of the first four 3′ residues (e.g., comprises, e.g., consists of three phosphorothioate bonds at the 5′ end of the polynucleotide(s)), a 2′ O-methyl modification at each of the first three 5′ residues, and a 2′ O-methyl modification at each of the 4^{th}-to-terminal, 3^{r}d-to-terminal, and 2nd-to-terminal 3′ residues, and an additional inverted abasic residue at each of the 5′ and 3′ ends.

[0276] In an embodiment, the gRNA is a dgRNA and comprises, e.g., consists of:
[0277] crRNA:
[0278] mN*mN*mN*NNNNNNNNNNNNNNNNNGUUUUAGAGCUAU*mG*mC*mU (SEQ ID NO: 3179), where m indicates a base with 2′O-Methyl modification, * indicates a phosphorothioate bond, and N′s indicate the residues of the targeting domain, e.g., as described herein, (optionally with an inverted abasic residue at the 5′ and/or 3′ terminus); and
[0279] tracr:
[0280] AACAGCAUAGCAAGUUAAAAUAAGGCUAGUCCGUUAUCAACUUGAAAAAGUGGCACC GAGUCGGUGCUUUUUUU (SEQ ID NO: 3152) (optionally with an inverted abasic residue at the 5′ and/or 3′ tenninus).

[0281] In an embodiment, the gRNA is a dgRNA and comprises, e.g., consists of:
[0282] crRNA:
[0283] mN*mN*mN*NNNNNNNNNNNNNNNNNGUUUUAGAGCUAU*mG*mC*mU (SEQ ID NO: 3179), where m indicates a base with 2′O-Methyl modification, * indicates a phosphorothioate bond, and N′s indicate the residues of the targeting domain, e.g., as described herein, (optionally with an inverted abasic residue at the 5′ and/or 3′ terminus); and
[0284] tracr:
[0285] mA*mA*mC*AGCAUAGCAAGUUAAAAUAAGGCUAGUCCGUUAUCAACUUGAAAAAGUG GCACCGAGUCGGUGCUUUU*mU*mU*mU (SEQ ID NO: 3174), where m indicates a base with 2′O-Methyl modification, * indicates a phosphorothioate bond, and N′s indicate the residues of the targeting domain, e.g., as described herein, (optionally with an inverted abasic residue at the 5′ and/or 3′ terminus).

[0286] In an embodiment, the gRNA is a dgRNA and comprises, e.g., consists of:
[0287] crRNA:
[0288] mN*mN*mN*NNNNNNNNNNNNNNNNNGUUUUAGAGCUAUGCUGUU*mU*mU*mG (SEQ ID NO: 3180), where m indicates a base with 2′O-Methyl modification, * indicates a phosphorothioate bond, and N′s indicate the residues of the targeting domain, e.g., as described herein, (optionally with an inverted abasic residue at the 5′ and/or 3′ terminus); and
[0289] tracr:
[0290] AACAGCAUAGCAAGUUAAAAUAAGGCUAGUCCGUUAUCAACUUGAAAAAGUGGCACC GAGUCGGUGCUUUUUUU (SEQ ID NO: 3152) (optionally with an inverted abasic residue at the 5′ and/or 3′ tenninus).

[0291] In an embodiment, the gRNA is a dgRNA and comprises, e.g., consists of:
[0292] crRNA:
[0293] mN*mN*mN*NNNNNNNNNNNNNNNNNGUUUUAGAGCUAUGCUGUU*mU*mU*mG (SEQ ID NO: 3180), where m indicates a base with 2′O-Methyl modification, * indicates a phosphorothioate bond, and N′s indicate the residues of the targeting domain, e.g., as described herein, (optionally with an inverted abasic residue at the 5′ and/or 3′ terminus); and
[0294] tracr:
[0295] mA*mA*mC*AGCAUAGCAAGUUAAAAUAAGGCUAGUCCGUUAUCAACUUGAAAAAGUG GCACCGAGUCGGUGCUUUU*mU*mU*mU (SEQ ID NO: 3174), where m indicates a base with 2′O-Methyl modification, and * indicates a phosphorothioate bond (optionally with an inverted abasic residue at the 5′ and/or 3′ terminus).

[0296] In an embodiment, the gRNA is a dgRNA and comprises, e.g., consists of:
[0297] crRNA:

(SEQ ID NO: 3181)
NNNNNNNNNNNNNNNNNNNNGUUUUAGAGCUAUGCUGUUUUG,

where N′s indicate the residues of the targeting domain, e.g., as described herein, (optionally with an inverted abasic residue at the 5′ and/or 3′ terminus); and
[0298] tracr:
[0299] mA*mA*mC*AGCAUAGCAAGUUAAAAUAAGGCUAGUCCGUUAUCAACUUGAAAAAGUG GCACCGAGUCGGUGCUUUU*mU*mU*mU (SEQ ID NO: 3174), where m indicates a base with 2′O-Methyl modification, and * indicates a phosphorothioate bond (optionally with an inverted abasic residue at the 5′ and/or 3′ terminus).

[0300] In an embodiment, the gRNA is a sgRNA and comprises, e.g., consists of:
[0301] NNNNNNNNNNNNNNNNNNNNGUUUUAGAGCUAGAAAUAGCAAGUUAAAAUAAGGCUA GUCCGUUAUCAACUUGAAAAAGUGGCACCGAGUCGGUGCUUUU (SEQ ID NO: 3182), where m indicates a base with 2′O-Methyl modification, * indicates a phosphorothioate bond, and N′s indicate the residues of the targeting domain, e.g., as described herein, (optionally with an inverted abasic residue at the 5′ and/or 3′ terminus).

[0302] In an embodiment, the gRNA is a sgRNA and comprises, e.g., consists of:
[0303] mN*mN*mN*NNNNNNNNNNNNNNNNNGUUUUAGAGCUAGAAAUAGCAAGUUAAAAUA AGGCUAGUCCGUUAUCAACUUGAAAAAGUGGCACCGAGUCGGUGCU*mU*mU*mU (SEQ ID NO: 3183), where m indicates a base with 2′O-Methyl modification, * indicates a phosphorothioate bond, and N′s indicate the residues of the targeting domain, e.g., as described herein, (optionally with an inverted abasic residue at the 5′ and/or 3′ terminus).

[0304] In an embodiment, the gRNA is a sgRNA and comprises, e.g., consists of:
[0305] mN*mN*mN*NNNNNNNNNNNNNNNNNGUUUUAGAGCUAGAAAUAGCAAGUUAAAAUA AGGCUAGUCCGUUAUCAACUUGAAAAAGUGGCACCGAGUCGGUGCmU*mU*mU*U (SEQ ID NO: 3184), where m indicates a base with 2′O-Methyl modification, * indicates a phosphorothioate bond, and N′s indicate the residues of the targeting domain, e.g., as described herein, (optionally with an inverted abasic residue at the 5′ and/or 3′ terminus).

### 7) First Tracr Extension

[0306] Where the gRNA comprises a first flagpole extension, the tracr may comprise a first tracr extension. The first tracr extension may comprise nucleotides that are complementary, e.g., 80%, 85%, 90%, 95% or 99%, e.g., fully complementary, with nucleotides of the first flagpole extension. In some aspects, the first tracr extension nucleotides that hybridize with complementary nucleotides of the first flagpole extension are contiguous. In some aspects, the first tracr extension nucleotides that hybridize with complementary nucleotides of the first flagpole extension are discontinuous, e.g., comprises two or more regions of hybridization separated by nucleotides that do not base pair with nucleotides of the first flagpole extension. In some aspects, the first tracr extension comprises at least 2, 3, 4, 5, 6, 7, 8, 9, 10, 11, 12, 13, 14, 15, 16, 17, 18, 19, 20 or more nucleotides. In some aspects, the first tracr extension comprises SEQ ID NO: 3117. In some aspects the first tracr extension comprises nucleic acid that is at least 80%, 85%, 90%, 95% or 99% homology to SEQ ID NO: 3117.

[0307] Some or all of the nucleotides of the first tracr extension can have a modification, e.g., modification found in Section XIII herein.

[0308] In some embodiments, the sgRNA may comprise, from 5′ to 3′, disposed 3′ to the targeting domain:

a)
(SEQ ID NO: 3123)
GUUUUAGAGCUAGAAAUAGCAAGUUAAAAUAAGGCUAGUCCGUUA
UCAACUUGAAAAAGUGGCACCGAGUCGGUGC;
b)
(SEQ ID NO: 3124)
GUUUAAGAGCUAGAAAUAGCAAGUUUAAAUAAGGCUAGUCCGUUA
UCAACUUGAAAAAGUGGCACCGAGUCGGUGC;
c)
(SEQ ID NO: 3125)
GUUUUAGAGCUAUGCUGGAAACAGCAUAGCAAGUUAAAAUAAGGC
UAGUCCGUUAUCAACUUGAAAAAGUGGCACCGAGUCGGUGC;
d)
(SEQ ID NO: 3126)
GUUUAAGAGCUAUGCUGGAAACAGCAUAGCAAGUUUAAAUAAGGC
UAGUCCGUUAUCAACUUGAAAAAGUGGCACCGAGUCGGUGC;

[0309] e) any of a) to d), above, further comprising, at the 3′ end, at least 1, 2, 3, 4, 5, 6 or 7 uracil (U) nucleotides, e.g., 1, 2, 3, 4, 5, 6, or 7 uracil (U) nucleotides;
[0310] f) any of a) to d), above, further comprising, at the 3′ end, at least 1, 2, 3, 4, 5, 6 or 7 adenine (A) nucleotides, e.g., 1, 2, 3, 4, 5, 6, or 7 adenine (A) nucleotides; or
[0311] g) any of a) to f), above, further comprising, at the 5′ end (e.g., at the 5′ terminus, e.g., 5′ to the targeting domain), at least 1, 2, 3, 4, 5, 6 or 7 adenine (A) nucleotides, e.g., 1, 2, 3, 4, 5, 6, or 7 adenine (A) nucleotides. In embodiments, any of a) to g) above is disposed directly 3′ to the targeting domain. In an embodiment, a sgRNA of the invention comprises, e.g., consists of, from 5′ to 3′: [targeting domain]—

(SEQ ID NO: 3159)
GUUUUAGAGCUAGAAAUAGCAAGUUAAAAUAAGGCUAGUC
CGUUAUCAACUUGAAAAAGUGGCACCGAGUCGGUGCUUUU.

[0312] In an embodiment, a sgRNA of the invention comprises, e.g., consists of, from 5′ to 3′: [targeting domain]—

(SEQ ID NO: 3155)
GUUUAAGAGCUAUGCUGGAAACAGCAUAGCAAGUUUAAAUA
AGGCUAGUCCGUUAUCAACUUGAAAAAGUGGCACCGAGUCG
GUGCUUUU.

[0313] In some embodiments, the dgRNA may comprise:
[0314] A crRNA comprising, from 5′ to 3′, preferably disposed directly 3′ to the targeting domain:

a)
(SEQ ID NO: 3110)
GUUUUAGAGCUA;
b)
(SEQ ID NO: 3111)
GUUUAAGAGCUA;
c)
(SEQ ID NO: 3127)
GUUUUAGAGCUAUGCUG;
d)
(SEQ ID NO: 3128)
GUUUAAGAGCUAUGCUG;
e)
(SEQ ID NO: 3129)
GUUUUAGAGCUAUGCUGUUUUG;
f)
(SEQ ID NO: 3130)
GUUUAAGAGCUAUGCUGUUUUG;
or
g)
(SEQ ID NO: 3154)
GUUUUAGAGCUAUGCU:

[0315] and a tracr comprising, from 5′ to 3′:

a)
(SEQ ID NO: 3115)
UAGCAAGUUAAAAUAAGGCUAGUCCGUUAUCAACUUGAAAAAGUG
GCACCGAGUCGGUGC;
b)
(SEQ ID NO: 3116)
UAGCAAGUUUAAAUAAGGCUAGUCCGUUAUCAACUUGAAAAAGUG
GCACCGAGUCGGUGC;
c)
(SEQ ID NO: 3131)
CAGCAUAGCAAGUUAAAAUAAGGCUAGUCCGUUAUCAACUUGAAA
AAGUGGCACCGAGUCGGUGC;
d)
(SEQ ID NO: 3132)
CAGCAUAGCAAGUUUAAAUAAGGCUAGUCCGUUAUCAACUUGAAAA
AGUGGCACCGAGUCGGUGC;
e)
(SEQ ID NO: 3152)
AACAGCAUAGCAAGUUAAAAUAAGGCUAGUCCGUUAUCAACUUGA
AAAAGUGGCACCGAGUCGGUGCUUUUUUU;
f)
(SEQ ID NO: 3153)
AACAGCAUAGCAAGUUUAAAUAAGGCUAGUCCGUUAUCAACUUGA
AAAAGUGGCACCGAGUCGGUGCUUUUUUU;
g)
(SEQ ID NO: 3160)
AACAGCAUAGCAAGUUAAAAUAAGGCUAGUCCGUUAUCAACUUGA
AAAAGUGGCACCGAGUCGGUGC
h)
(SEQ ID NO: 3155)
GUUUAAGAGCUAUGCUGGAAACAGCAUAGCAAGUUUAAAUAAGGC
UAGUCCGUUAUCAACUUGAAAAAGUGGCACCGAGUCGGUGCUUUU;
i)
(SEQ ID NO: 3156)
AGCAUAGCAAGUUAAAAUAAGGCUAGUCCGUUAUCAACUUGAAAA
AGUGGCACCGAGUCGGUGCUUU;
j)
(SEQ ID NO: 3157)
GUUGGAACCAUUCAAAACAGCAUAGCAAGUUAAAAUAAGGCUAGU
CCGUUAUCAACUUGAAAAAGUGGCACCGAGUCGGUGCUUU;

[0316] k) any of a) to j), above, further comprising, at the 3′ end, at least 1, 2, 3, 4, 5, 6 or 7 uracil (U) nucleotides, e.g., 1, 2, 3, 4, 5, 6, or 7 uracil (U) nucleotides;
[0317] l) any of a) to j), above, further comprising, at the 3′ end, at least 1, 2, 3, 4, 5, 6 or 7 adenine (A) nucleotides, e.g., 1, 2, 3, 4, 5, 6, or 7 adenine (A) nucleotides; or
[0318] m) any of a) to 1), above, further comprising, at the 5′ end (e.g., at the 5′ terminus), at least 1, 2, 3, 4, 5, 6 or 7 adenine (A) nucleotides, e.g., 1, 2, 3, 4, 5, 6, or 7 adenine (A) nucleotides.

[0319] In an embodiment, the sequence of k), above comprises the 3′ sequence UUUUUU, e.g., if a U6 promoter is used for transcription. In an embodiment, the sequence of k), above, comprises the 3′ sequence UUUU, e.g., if an HI promoter is used for transcription. In an embodiment, sequence of k), above, comprises variable numbers of 3′ U's depending, e.g., on the termination signal of the pol-III promoter used. In an embodiment, the sequence of k), above, comprises variable 3′ sequence derived from the DNA template if a T7 promoter is used. In an embodiment, the sequence of k), above, comprises variable 3′ sequence derived from the DNA template, e.g., if in vitro transcription is used to generate the RNA molecule. In an embodiment, the sequence of k), above, comprises variable 3′ sequence derived from the DNA template, e.g., if a pol-II promoter is used to drive transcription. In an embodiment, the crRNA comprises, e.g., consists of, a targeting domain and, disposed 3′ to the targeting domain (e.g., disposed directly 3′ to the targeting domain), a sequence comprising, e.g., consisting of, SEQ ID NO: 3129, and the tracr comprises, e.g., consists of

(SEQ ID NO: 3152)
AACAGCAUAGCAAGUUAAAAUAAGGCUAGUCCGUUAU
CAACUUGAAAAAGUGGCACCGAGUCGGUGCUUUUUUU

[0320] In an embodiment, the crRNA comprises, e.g., consists of, a targeting domain and, disposed 3′ to the targeting domain (e.g., disposed directly 3′ to the targeting domain), a sequence comprising, e.g., consisting of, SEQ ID NO: 3130, and the tracr comprises, e.g., consists of,

(SEQ ID NO: 3153)
AACAGCAUAGCAAGUUUAAAUAAGGCUAGUCCGUUAU
CAACUUGAAAAAGUGGCACCGAGUCGGUGCUUUUUUU

[0321] In an embodiment, the crRNA comprises, e.g., consists of, a targeting domain and, disposed 3′ to the targeting domain (e.g., disposed directly 3′ to the targeting domain), a sequence comprising, e.g., consisting of, GUUUUAGAGCUAUGCU (SEQ ID NO: 3154), and the tracr comprises, e.g., consists of,

(SEQ ID NO: 3155)
GUUUAAGAGCUAUGCUGGAAACAGCAUAGCAAGUUUA
AAUAAGGCUAGUCCGUUAUCAACUUGAAAAAGUGGCA
CCGAGUCGGUGCUUUU

[0322] In an embodiment, the crRNA comprises, e.g., consists of, a targeting domain and, disposed 3′ to the targeting domain (e.g., disposed directly 3′ to the targeting domain), a sequence comprising, e.g., consisting of, GUUUUAGAGCUAUGCU (SEQ ID NO: 3154), and the tracr comprises, e.g., consists of, AGCAUAGCAAGUUAAAAUAAGGCUAGUCCGUUAUCAACUUGAAAAAGUGGCACCGAG UCGGUGCUUU (SEQ ID NO: 3156).

(SEQ ID NO: 3156)
AGCAUAGCAAGUUAAAAUAAGGCUAGUCCGUUAUCAA
CUUGAAAAAGUGGCACCGAGUCGGUGCUUU

[0323] In an embodiment, the crRNA comprises, e.g., consists of, a targeting domain and, disposed 3′ to the targeting domain (e.g., disposed directly 3′ to the targeting domain), a sequence comprising, e.g., consisting of, GUUUUAGAGCUAUGCUGUUUUG (SEQ ID NO: 3129), and the tracr comprises, e.g., consists of,

(SEQ ID NO: 3157)
GUUGGAACCAUUCAAAACAGCAUAGCAAGUUAAAAUA
AGGCUAGUCCGUUAUCAACUUGAAAAAGUGGCACCGA
GUCGGUGCUUU

### II. gRNA Targeting Domains Directed to ZNF644 Gene

[0324] Provided in the Table 1-Table 3 (at the end of the document) are targeting domains directed to ZNF644 gene regions, for gRNA molecules of the present invention, and for use in the various aspects of the present invention, for example, in altering expression of globin genes, for example, a fetal hemoglobin gene or a hemoglobin beta gene.

### III. Methods for Designing gRNAs

[0325] Methods for designing gRNAs are described herein, including methods for selecting, designing and validating target sequences. Exemplary targeting domains are also provided herein. Targeting Domains discussed herein can be incorporated into the gRNAs described herein.

[0326] Methods for selection and validation of target sequences as well as off-target analyses are described, e.g., in. Mali et al., 2013 SCIENCE 339(6121): 823-826; Hsu et al, 2013 NAT BIOTECHNOL, 31 (9): 827-32; Fu et al, 2014 NAT BIOTECHNOL, doi: 10.1038/nbt.2808. PubMed PM ID: 24463574; Heigwer et al, 2014 NAT METHODS 11 (2): 122-3. doi: 10.1038/nmeth.2812. PubMed PMID: 24481216; Bae et al, 2014 BIOINFORMATICS PubMed PMID: 24463181; Xiao A el al, 2014 BIOINFORMATICS PubMed PMID: 24389662.

[0327] For example, a software tool can be used to optimize the choice of gRNA within a user's target sequence, e.g., to minimize total off-target activity across the genome. Off target activity may be other than cleavage. For each possible gRNA choice e.g., using S. pyogenes Cas9, the tool can identify all off-target sequences (e.g., preceding either NAG or NGG PAMs) across the genome that contain up to certain number (e.g., 1, 2, 3, 4, 5, 6, 7, 8, 9, or 10) of mismatched base-pairs. The cleavage efficiency at each off-target sequence can be predicted, e.g., using an experimentally-derived weighting scheme. Each possible gRNA is then ranked according to its total predicted off-target cleavage; the top-ranked gRNAs represent those that are likely to have the greatest on-target and the least off-target cleavage. Other functions, e.g., automated reagent design for CRISPR construction, primer design for the on-target Surveyor assay, and primer design for high-throughput detection and quantification of off-target cleavage via next-gen sequencing, can also be included in the tool. Candidate gRNA molecules can be evaluated by art-known methods or as described herein.

[0328] Although software algorithms may be used to generate an initial list of potential gRNA molecules, cutting efficiency and specificity will not necessarily reflect the predicted values, and gRNA molecules typically require screening in specific cell lines, e.g., primary human cell lines, e.g., human HSPCs, e.g., human CD34+ cells, to determine, for example, cutting efficiency, indel formation, cutting specificity and change in desired phenotype. These properties may be assayed by the methods described herein.

### IV. Cas Molecules

### Cas9 Molecules

[0329] In preferred embodiments, the Cas molecule is a Cas9 molecule. Cas9 molecules of a variety of species can be used in the methods and compositions described herein. While the S. pyogenes Cas9 molecule are the subject of much of the disclosure herein, Cas9 molecules of, derived from, or based on the Cas9 proteins of other species listed herein can be used as well. In other words, other Cas9 molecules, e.g., S. thermophilus, Staphylococcus aureus and/or Neisseria meningitidis Cas9 molecules, may be used in the systems, methods and compositions described herein. Additional Cas9 species include: Acidovorax avenae, Actinobacillus pleuropneumoniae, Actinobacillus succinogenes, Actinobacillus suis, Actinomyces sp., Cycliphilus denitrificans, Aminomonas paucivorans, Bacillus cereus, Bacillus smithii, Bacillus thuringiensis, Bacteroides sp., Blastopirellula marina, Bradyrhiz′ obium sp., Brevibacillus latemsporus, Campylobacter coli, Campylobacter jejuni, Campylobacter lad, Candidatus puniceispirillum, Clostridiu cellulolyticum, Clostridium perfringens, Corynebacterium accolens, Corynebacterium diphtheria, Corynebacterium matruchotii, Dinoroseobacter sliibae, Eubacterium dolichum, Gamma proteobacterium, Gluconacetobacler diazotrophicus, Haemophilus parainfluenzae, Haemophilus sputorum, Helicobacter canadensis, Helicobacter cinaedi, Helicobacter mustelae, Ilyobacler polytropus, Kingella kingae, Lactobacillus crispatus, Listeria ivanovii, Listeria monocytogenes, Listeriaceae bacterium, Methylocystis sp., Methylosinus trichosporium, Mobiluncus mulieris, Neisseria bacilliformis, Neisseria cinerea, Neisseria flavescens, Neisseria lactamica. Neisseria sp., Neisseria wadsworthii, Nitrosomonas sp., Parvibaculum lavamentivorans, Pasteurella multocida, Phascolarctobacterium succinatutens, Ralstonia syzygii, Rhodopseudomonas palustris, Rhodovulum sp., Simonsiella muelleri, Sphingomonas sp., Sporolactobacillus vineae, Staphylococcus lugdunensis, Streptococcus sp., Subdoligranulum sp., Tislrella mobilis, Treponema sp., or Verminephrobacter eiseniae.

[0330] A Cas9 molecule, as that term is used herein, refers to a molecule that can interact with a gRNA molecule (e.g., sequence of a domain of a tracr) and, in concert with the gRNA molecule, localize (e.g., target or home) to a site which comprises a target sequence and PAM sequence.

[0331] In an embodiment, the Cas9 molecule is capable of cleaving a target nucleic acid molecule, which may be referred to herein as an active Cas9 molecule. In an embodiment, an active Cas9 molecule, comprises one or more of the following activities: a nickase activity, i.e., the ability to cleave a single strand, e.g., the non-complementary strand or the complementary strand, of a nucleic acid molecule; a double stranded nuclease activity, i.e., the ability to cleave both strands of a double stranded nucleic acid and create a double stranded break, which in an embodiment is the presence of two nickase activities; an endonuclease activity; an exonuclease activity; and a helicase activity, i.e., the ability to unwind the helical structure of a double stranded nucleic acid.

[0332] In an embodiment, an enzymatically active Cas9 molecule cleaves both DNA strands and results in a double stranded break. In an embodiment, a Cas9 molecule cleaves only one strand, e.g., the strand to which the gRNA hybridizes to, or the strand complementary to the strand the gRNA hybridizes with. In an embodiment, an active Cas9 molecule comprises cleavage activity associated with an HNH-like domain. In an embodiment, an active Cas9 molecule comprises cleavage activity associated with an N-terminal RuvC-like domain. In an embodiment, an active Cas9 molecule comprises cleavage activity associated with an HNH-like domain and cleavage activity associated with an N-terminal RuvC-like domain. In an embodiment, an active Cas9 molecule comprises an active, or cleavage competent, HNH-like domain and an inactive, or cleavage incompetent, N-terminal RuvC-like domain. In an embodiment, an active Cas9 molecule comprises an inactive, or cleavage incompetent, HNH-like domain and an active, or cleavage competent, N-terminal RuvC-like domain.

[0333] In an embodiment, the ability of an active Cas9 molecule to interact with and cleave a target nucleic acid is PAM sequence dependent. A PAM sequence is a sequence in the target nucleic acid. In an embodiment, cleavage of the target nucleic acid occurs upstream from the PAM sequence. Active Cas9 molecules from different bacterial species can recognize different sequence motifs (e.g., PAM sequences). In an embodiment, an active Cas9 molecule of S. pyogenes recognizes the sequence motif NGG and directs cleavage of a target nucleic acid sequence 1 to 10, e.g., 3 to 5, base pairs upstream from that sequence. See, e.g., Mali et al, SCIENCE 2013; 339(6121): 823-826. In an embodiment, an active Cas9 molecule of S. thermophilus recognizes the sequence motif NGGNG and NNAG AAW (W=A or T) and directs cleavage of a core target nucleic acid sequence 1 to 10, e.g., 3 to 5, base pairs upstream from these sequences. See, e.g., Horvath et al., SCIENCE 2010; 327(5962): 167-170, and Deveau et al, J BACTERIOL 2008; 190(4): 1390-1400. In an embodiment, an active Cas9 molecule of S. mulans recognizes the sequence motif NGG or NAAR (R-A or G) and directs cleavage of a core target nucleic acid sequence 1 to 10, e.g., 3 to 5 base pairs, upstream from this sequence. See, e.g., Deveau et al., J BACTERIOL 2008; 190(4): 1390-1400.

[0334] In an embodiment, an active Cas9 molecule of S. aureus recognizes the sequence motif NNGRR (R=A or G) and directs cleavage of a target nucleic acid sequence 1 to 10, e.g., 3 to 5, base pairs upstream from that sequence. See, e.g., Ran F. et al., NATURE, vol. 520, 2015, pp. 186-191. In an embodiment, an active Cas9 molecule of N. meningitidis recognizes the sequence motif NNNNGATT and directs cleavage of a target nucleic acid sequence 1 to 10, e.g., 3 to 5, base pairs upstream from that sequence. See, e.g., Hou et al., PNAS EARLY EDITION 2013, 1-6. The ability of a Cas9 molecule to recognize a PAM sequence can be determined, e.g., using a transformation assay described in Jinek et al, SCIENCE 2012, 337:816.

[0335] Some Cas9 molecules have the ability to interact with a gRNA molecule, and in conjunction with the gRNA molecule home (e.g., targeted or localized) to a core target domain, but are incapable of cleaving the target nucleic acid, or incapable of cleaving at efficient rates. Cas9 molecules having no, or no substantial, cleavage activity may be referred to herein as an inactive Cas9 (an enzymatically inactive Cas9), a dead Cas9, or a dCas9 molecule. For example, an inactive Cas9 molecule can lack cleavage activity or have substantially less, e.g., less than 20, 10, 5, 1 or 0.1% of the cleavage activity of a reference Cas9 molecule, as measured by an assay described herein.

[0336] Exemplary naturally occurring Cas9 molecules are described in Chylinski et al, RNA Biology 2013; 10:5, 727-737. Such Cas9 molecules include Cas9 molecules of a cluster 1 bacterial family, cluster 2 bacterial family, cluster 3 bacterial family, cluster 4 bacterial family, cluster 5 bacterial family, cluster 6 bacterial family, a cluster 7 bacterial family, a cluster 8 bacterial family, a cluster 9 bacterial family, a cluster 10 bacterial family, a cluster 11 bacterial family, a cluster 12 bacterial family, a cluster 13 bacterial family, a cluster 14 bacterial family, a cluster 1 bacterial family, a cluster 16 bacterial family, a cluster 17 bacterial family, a cluster 18 bacterial family, a cluster 19 bacterial family, a cluster 20 bacterial family, a cluster 21 bacterial family, a cluster 22 bacterial family, a cluster 23 bacterial family, a cluster 24 bacterial family, a cluster 25 bacterial family, a cluster 26 bacterial family, a cluster 27 bacterial family, a cluster 28 bacterial family, a cluster 29 bacterial family, a cluster 30 bacterial family, a cluster 31 bacterial family, a cluster 32 bacterial family, a cluster 33 bacterial family, a cluster 34 bacterial family, a cluster 35 bacterial family, a cluster 36 bacterial family, a cluster 37 bacterial family, a cluster 38 bacterial family, a cluster 39 bacterial family, a cluster 40 bacterial family, a cluster 41 bacterial family, a cluster 42 bacterial family, a cluster 43 bacterial family, a cluster 44 bacterial family, a cluster 45 bacterial family, a cluster 46 bacterial family, a cluster 47 bacterial family, a cluster 48 bacterial family, a cluster 49 bacterial family, a cluster 50 bacterial family, a cluster 51 bacterial family, a cluster 52 bacterial family, a cluster 53 bacterial family, a cluster 54 bacterial family, a cluster 55 bacterial family, a cluster 56 bacterial family, a cluster 57 bacterial family, a cluster 58 bacterial family, a cluster 59 bacterial family, a cluster 60 bacterial family, a cluster 61 bacterial family, a cluster 62 bacterial family, a cluster 63 bacterial family, a cluster 64 bacterial family, a cluster 65 bacterial family, a cluster 66 bacterial family, a cluster 67 bacterial family, a cluster 68 bacterial family, a cluster 69 bacterial family, a cluster 70 bacterial family, a cluster 71 bacterial family, a cluster 72 bacterial family, a cluster 73 bacterial family, a cluster 74 bacterial family, a cluster 75 bacterial family, a cluster 76 bacterial family, a cluster 77 bacterial family, or a cluster 78 bacterial family.

[0337] Exemplary naturally occurring Cas9 molecules include a Cas9 molecule of a cluster 1 bacterial family. Examples include a Cas9 molecule of: S. pyogenes (e.g., strain SF370, MGAS 10270, MGAS 10750, MGAS2096, MGAS315, MGAS5005, MGAS6180, MGAS9429, NZ131 and SSI-1), S. thermophilus (e.g., strain LMD-9), S. pseudoporcinus (e.g., strain SPIN 20026), S. mutans (e.g., strain UA 159, NN2025), S. macacae (e.g., strain NCTC1 1558), S. gallolylicus (e.g., strain UCN34, ATCC BAA-2069), S. equines (e.g., strain ATCC 9812, MGCS 124), S. dysdalactiae (e.g., strain GGS 124), S. bovis (e.g., strain ATCC 700338), S. cmginosus (e.g.; strain F021 1), S. agalactia (e.g., strain NEM316, A909), Listeria monocytogenes (e.g., strain F6854), Listeria innocua (L. innocua, e.g., strain Clip 11262), Enterococcus italicus (e.g., strain DSM 15952), or Enterococcus faecium (e.g., strain 1,231,408). Additional exemplary Cas9 molecules are a Cas9 molecule of Neisseria meningitidis (Hou et al. PNAS Early Edition 2013, 1-6) and a S. aureus Cas9 molecule.

[0338] In an embodiment, a Cas9 molecule, e.g., an active Cas9 molecule or inactive Cas9 molecule, comprises an amino acid sequence: having 60%, 65%, 70%, 75%, 80%, 85%, 90%, 95%, 96%, 97%, 98%, or 99% homology with; differs at no more than 1%, 2%, 5%, 10%, 15%, 20%, 30%, or 40% of the amino acid residues when compared with; differs by at least 1, 2, 5, 10 or 20 amino acids but by no more than 100, 80, 70, 60, 50, 40 or 30 amino acids from; or is identical to; any Cas9 molecule sequence described herein or a naturally occurring Cas9 molecule sequence, e.g., a Cas9 molecule from a species listed herein or described in Chylinski et al., RNA Biology 2013, 10:5, T2T-1 Hou et al. PNAS Early Edition 2013, 1-6.

[0339] In an embodiment, a Cas9 molecule comprises an amino acid sequence having 60%, 65%, 70%, 75%, 80%, 85%, 90%, 95%, 96%, 97%, 98%, or 99% homology with; differs at no more than 1%, 2%, 5%, 10%, 15%, 20%, 30%, or 40% of the amino acid residues when compared with; differs by at least 1, 2, 5, 10 or 20 amino acids but by no more than 100, 80, 70, 60, 50, 40 or 30 amino acids from; or is identical to; S. pyogenes Cas9 (NCBI Reference Sequence: WP_010922251.1; SEQ ID NO: 3133).

[0340] In embodiments, the Cas9 molecule is a S. pyogenes Cas9 variant of SEQ ID NO: 3133 that includes one or more mutations to positively charged amino acids (e.g., lysine, arginine or histidine) that introduce an uncharged or nonpolar amino acid, e.g., alanine, at said position. In embodiments, the mutation is to one or more positively charged amino acids in the nt-groove of Cas9. In embodiments, the Cas9 molecule is a S. pyogenes Cas9 variant of SEQ ID NO: 3133 that includes a mutation at position 855 of SEQ ID NO: 3133, for example a mutation to an uncharged amino acid, e.g., alanine, at position 855 of SEQ ID NO: 3133. In embodiments, the Cas9 molecule has a mutation only at position 855 of SEQ ID NO: 3133, relative to SEQ ID NO: 3133, e.g., to an uncharged amino acid, e.g., alanine. In embodiments, the Cas9 molecule is a S. pyogenes Cas9 variant of SEQ ID NO: 3133 that includes a mutilation at position 810, a mutation at position 1003, and/or a mutation at position 1060 of SEQ ID NO: 3133, for example a mutation to alanine at position 810, position 1003, and/or position 1060 of SEQ ID NO: 3133. In embodiments, the Cas9 molecule has a mutation only at position 810, position 1003, and position 1060 of SEQ ID NO: 3133, relative to SEQ ID NO: 3133, e.g., where each mutation is to an uncharged amino acid, for example, alanine. In embodiments, the Cas9 molecule is a S. pyogenes Cas9 variant of SEQ ID NO: 3133 that includes a mutation at position 848, a mutation at position 1003, and/or a mutation at position 1060 of SEQ ID NO: 3133, for example a mutation to alanine at position 848, position 1003, and/or position 1060 of SEQ ID NO: 3133. In embodiments, the Cas9 molecule has a mutation only at position 848, position 1003, and position 1060 of SEQ ID NO: 3133, relative to SEQ ID NO: 3133, e.g., where each mutation is to an uncharged amino acid, for example, alanine. In embodiments, the Cas9 molecule is a Cas9 molecule as described in Slaymaker et al., Science Express, available online Dec. 1, 2015 at Science DOI: 10.1126/science.aad5227.

[0341] In embodiments, the Cas9 molecule is a S. pyogenes Cas9 variant of SEQ ID NO: 3133 that includes one or more mutations. In embodiments, the Cas9 variant comprises a mutation at position 80 of SEQ ID NO: 3133, e.g., includes a leucine at position 80 of SEQ ID NO: 3133 (i.e., comprises, e.g., consists of, SEQ ID NO: 3133 with a C80L mutation). In embodiments, the Cas9 variant comprises a mutation at position 574 of SEQ ID NO: 3133, e.g., includes a glutamic acid at position 574 of SEQ ID NO: 3133 (i.e., comprises, e.g., consists of, SEQ ID NO: 3133 with a C574E mutation). In embodiments, the Cas9 variant comprises a mutation at position 80 and a mutation at position 574 of SEQ ID NO: 3133, e.g., includes a leucine at position 80 of SEQ ID NO: 3133, and a glutamic acid at position 574 of SEQ ID NO: 3133 (i.e., comprises, e.g., consists of, SEQ ID NO: 3133 with a C80L mutation and a C574E mutation). Without being bound by theory, it is believed that such mutations improve the solution properties of the Cas9 molecule.

[0342] In embodiments, the Cas9 molecule is a S. pyogenes Cas9 variant of SEQ ID NO: 3133 that includes one or more mutations. In embodiments, the Cas9 variant comprises a mutation at position 147 of SEQ ID NO: 3133, e.g., includes a tyrosine at position 147 of SEQ ID NO: 3133 (i.e., comprises, e.g., consists of, SEQ ID NO: 3133 with a D147Y mutation). In embodiments, the Cas9 variant comprises a mutation at position 411 of SEQ ID NO: 3133, e.g., includes a threonine at position 411 of SEQ ID NO: 3133 (i.e., comprises, e.g., consists of, SEQ ID NO: 3133 with a P411T mutation). In embodiments, the Cas9 variant comprises a mutation at position 147 and a mutation at position 411 of SEQ ID NO: 3133, e.g., includes a tyrosine at position 147 of SEQ ID NO: 3133, and a threonine at position 411 of SEQ ID NO: 3133 (i.e., comprises, e.g., consists of, SEQ ID NO: 3133 with a D147Y mutation and a P411T mutation). Without being bound by theory, it is believed that such mutations improve the targeting efficiency of the Cas9 molecule, e.g., in yeast.

[0343] In embodiments, the Cas9 molecule is a S. pyogenes Cas9 variant of SEQ ID NO: 3133 that includes one or more mutations. In embodiments, the Cas9 variant comprises a mutation at position 1135 of SEQ ID NO: 3133, e.g., includes a glutamic acid at position 1135 of SEQ ID NO: 3133 (i.e., comprises, e.g., consists of, SEQ ID NO: 3133 with a D1135E mutation). Without being bound by theory, it is believed that such mutations improve the selectivity of the Cas9 molecule for the NGG PAM sequence versus the NAG PAM sequence.

[0344] In embodiments, the Cas9 molecule is a S. pyogenes Cas9 variant of SEQ ID NO: 3133 that includes one or more mutations that introduce an uncharged or nonpolar amino acid, e.g., alanine, at certain positions. In embodiments, the Cas9 molecule is a S. pyogenes Cas9 variant of SEQ ID NO: 3133 that includes a mutation at position 497, a mutation at position 661, a mutation at position 695 and/or a mutation at position 926 of SEQ ID NO: 3133, for example a mutation to alanine at position 497, position 661, position 695 and/or position 926 of SEQ ID NO: 3133. In embodiments, the Cas9 molecule has a mutation only at position 497, position 661, position 695, and position 926 of SEQ ID NO: 3133, relative to SEQ ID NO: 3133, e.g., where each mutation is to an uncharged amino acid, for example, alanine. Without being bound by theory, it is believed that such mutations reduce the cutting by the Cas9 molecule at off-target sites

[0345] It will be understood that the mutations described herein to the Cas9 molecule may be combined, and may be combined with any of the fusions or other modifications described herein, and the Cas9 molecule tested in the assays described herein.

[0346] Various types of Cas molecules can be used to practice the inventions disclosed herein. In some embodiments, Cas molecules of Type II Cas systems are used. In other embodiments, Cas molecules of other Cas systems are used. For example, Type I or Type III Cas molecules may be used. Exemplary Cas molecules (and Cas systems) are described, e.g., in Haft et ai, PLoS COMPUTATIONAL BIOLOGY 2005, 1(6): e60 and Makarova et al, NATURE REVIEW MICROBIOLOGY 2011, 9:467-477, the contents of both references are incorporated herein by reference in their entirety.

[0347] In an embodiment, the Cas9 molecule comprises one or more of the following activities: a nickase activity; a double stranded cleavage activity (e.g., an endonuclease and/or exonuclease activity); a helicase activity; or the ability, together with a gRNA molecule, to localize to a target nucleic acid.

### Altered Cas9 Molecules

[0348] Naturally occurring Cas9 molecules possess a number of properties, including: nickase activity, nuclease activity (e.g., endonuclease and/or exonuclease activity); helicase activity; the ability to associate functionally with a gRNA molecule; and the ability to target (or localize to) a site on a nucleic acid (e.g., PAM recognition and specificity). In an embodiment, a Cas9 molecules can include all or a subset of these properties. In typical embodiments, Cas9 molecules have the ability to interact with a gRNA molecule and, in concert with the gRNA molecule, localize to a site in a nucleic acid. Other activities, e.g., PAM specificity, cleavage activity, or helicase activity can vary more widely in Cas9 molecules.

[0349] Cas9 molecules with desired properties can be made in a number of ways, e.g., by alteration of a parental, e.g., naturally occurring Cas9 molecules to provide an altered Cas9 molecule having a desired property. For example, one or more mutations or differences relative to a parental Cas9 molecule can be introduced. Such mutations and differences comprise: substitutions (e.g., conservative substitutions or substitutions of non-essential amino acids); insertions; or deletions. In an embodiment, a Cas9 molecule can comprises one or more mutations or differences, e.g., at least 1, 2, 3, 4, 5, 10, 15, 20, 30, 40 or 50 mutations but less than 200, 100, or 80 mutations relative to a reference Cas9 molecule. In an embodiment, a mutation or mutations do not have a substantial effect on a Cas9 activity, e.g. a Cas9 activity described herein. In an embodiment, a mutation or mutations have a substantial effect on a Cas9 activity, e.g. a Cas9 activity described herein. In an embodiment, exemplary activities comprise one or more of PAM specificity, cleavage activity, and helicase activity. A mutation(s) can be present, e.g., in: one or more RuvC-like domain, e.g., an N-terminal RuvC-like domain; an HNH-like domain; a region outside the RuvC-like domains and the HNH-like domain. In some embodiments, a mutation(s) is present in an N-terminal RuvC-like domain. In some embodiments, a mutation(s) is present in an HNH-like domain. In some embodiments, mutations are present in both an N-terminal RuvC-like domain and an HNH-like domain.

[0350] Whether or not a particular sequence, e.g., a substitution, may affect one or more activity, such as targeting activity, cleavage activity, etc., can be evaluated or predicted, e.g., by evaluating whether the mutation is conservative or by the method described in Section III. In an embodiment, a “non-essential” amino acid residue, as used in the context of a Cas9 molecule, is a residue that can be altered from the wild-type sequence of a Cas9 molecule, e.g., a naturally occurring Cas9 molecule, e.g., an active Cas9 molecule, without abolishing or more preferably, without substantially altering a Cas9 activity (e.g., cleavage activity), whereas changing an “essential” amino acid residue results in a substantial loss of activity (e.g., cleavage activity).

Cas9 Molecules with Altered PAM Recognition or No PAM Recognition

[0351] Naturally occurring Cas9 molecules can recognize specific PAM sequences, for example the PAM recognition sequences described above for S. pyogenes, S. thermophilus, S. mutans, S. aureus and N. meningitidis.

[0352] In an embodiment, a Cas9 molecule has the same PAM specificities as a naturally occurring Cas9 molecule. In other embodiments, a Cas9 molecule has a PAM specificity not associated with a naturally occurring Cas9 molecule, or a PAM specificity not associated with the naturally occurring Cas9 molecule to which it has the closest sequence homology. For example, a naturally occurring Cas9 molecule can be altered, e.g., to alter PAM recognition, e.g., to alter the PAM sequence that the Cas9 molecule recognizes to decrease off target sites and/or improve specificity; or eliminate a PAM recognition requirement. In an embodiment, a Cas9 molecule can be altered, e.g., to increase length of PAM recognition sequence and/or improve Cas9 specificity to high level of identity to decrease off target sites and increase specificity. In an embodiment, the length of the PAM recognition sequence is at least 4, 5, 6, 7, 8, 9, 10 or 15 amino acids in length. Cas9 molecules that recognize different PAM sequences and/or have reduced off-target activity canbe generated using directed evolution. Exemplary methods and systems that can be used for directed evolution of Cas9 molecules are described, e.g., in Esvelt et al., Nature 2011, 472(7344): 499-503. Candidate Cas9 molecules can be evaluated, e.g., by methods described herein.

### Non-Cleaving and Modified-Cleavage Cas9 Molecules

[0353] In an embodiment, a Cas9 molecule comprises a cleavage property that differs from naturally occurring Cas9 molecules, e.g., that differs from the naturally occurring Cas9 molecule having the closest homology. For example, a Cas9 molecule can differ from naturally occurring Cas9 molecules, e.g., a Cas9 molecule of S. pyogenes, as follows: its ability to modulate, e.g., decreased or increased, cleavage of a double stranded break (endonuclease and/or exonuclease activity), e.g., as compared to a naturally occurring Cas9 molecule (e.g., a Cas9 molecule of S. pyogenes); its ability to modulate, e.g., decreased or increased, cleavage of a single strand of a nucleic acid, e.g., a non-complimentary strand of a nucleic acid molecule or a complementary strand of a nucleic acid molecule (nickase activity), e.g., as compared to a naturally occurring Cas9 molecule (e.g., a Cas9 molecule of S. pyogenes); or the ability to cleave a nucleic acid molecule, e.g., a double stranded or single stranded nucleic acid molecule, can be eliminated.

### Modified Cleavage Active Cas9 Molecules

[0354] In an embodiment, an active Cas9 molecule comprises one or more of the following activities: cleavage activity associated with an N-terminal RuvC-like domain; cleavage activity associated with an HNH-like domain; cleavage activity associated with an HNH domain and cleavage activity associated with an N-terminal RuvC-like domain.

[0355] In an embodiment, the Cas9 molecule is a Cas9 nickase, e.g., cleaves only a single strand of DNA. In an embodiment, the Cas9 nickase includes a mutation at position 10 and/or a mutation at position 840 of SEQ ID NO: 3133, e.g., comprises a D10A and/or H840A mutation to SEQ ID NO: 3133.

### Non-Cleaving Inactive Cas9 Molecules

[0356] In an embodiment, the altered Cas9 molecule is an inactive Cas9 molecule which does not cleave a nucleic acid molecule (either double stranded or single stranded nucleic acid molecules) or cleaves a nucleic acid molecule with significantly less efficiency, e.g., less than 20, 10, 5, 1 or 0.1% of the cleavage activity of a reference Cas9 molecule, e.g., as measured by an assay described herein. The reference Cas9 molecule can by a naturally occurring unmodified Cas9 molecule, e.g., a naturally occurring Cas9 molecule such as a Cas9 molecule of S. pyogenes, S. thermophilus, S. aureus or N. meningitidis. In an embodiment, the reference Cas9 molecule is the naturally occurring Cas9 molecule having the closest sequence identity or homology. In an embodiment, the inactive Cas9 molecule lacks substantial cleavage activity associated with an N-terminal RuvC-like domain and cleavage activity associated with an HNH-like domain.

[0357] In an embodiment, the Cas9 molecule is dCas9 (Tsai et al. (2014), Nat. Biotech. 32:569-577).

[0358] A catalytically inactive Cas9 molecule may be fused with a transcription repressor. An inactive Cas9 fusion protein complexes with a gRNA and localizes to a DNA sequence specified by gRNA's targeting domain, but, unlike an active Cas9, it will not cleave the target DNA. Fusion of an effector domain, such as a transcriptional repression domain, to an inactive Cas9 enables recruitment of the effector to any DNA site specified by the gRNA. Site specific targeting of a Cas9 fusion protein to a promoter region of a gene can block or affect polymerase binding to the promoter region, for example, a Cas9 fusion with a transcription factor (e.g., a transcription activator) and/or a transcriptional enhancer binding to the nucleic acid to increase or inhibit transcription activation. Alternatively, site specific targeting of a Cas9-fusion to a transcription repressor to a promoter region of a gene can be used to decrease transcription activation.

[0359] Transcription repressors or transcription repressor domains that may be fused to an inactive Cas9 molecule can include ruppel associated box (KRAB or SKD), the Mad mSIN3 interaction domain (SID) or the ERF repressor domain (ERD).

[0360] In another embodiment, an inactive Cas9 molecule may be fused with a protein that modifies chromatin. For example, an inactive Cas9 molecule may be fused to heterochromatin protein 1 (HP1), a histone lysine methyltransferase (e.g., SUV39H1, SUV39H2, G9A, ESET/SETDB 1, Pr-SET7/8, SUV4-20H 1,RIZ1), a histone lysine demethylates (e.g., LSD1/BHC1 10, SpLsdl/Sw, 1/Safi 10, Su(var)3-3, JMJD2A/JHDM3A, JMJD2B, JMJD2C/GASCl, JMJD2D, Rph 1, JARID 1 A/RBP2, JARI DIB/PLU-I, JAR1D 1C/SMCX, JARID1 D/SMCY, Lid, Jhn2, Jmj2), a histone lysine deacetylases (e.g., HDAC1, HDAC2, HDAC3, HDAC8, Rpd3, Hos 1, Cir6, HDAC4, HDAC5, HDAC7, HDAC9, Hdal, Cir3, SIRT1, SIRT2, Sir2, Hst1, Hst2, Hst3, Hst4, HDAC 11) and a DNA methylases (DNMT1, DNMT2a/DMNT3b, METI). An inactive Cas9-chomatin modifying molecule fusion protein can be used to alter chromatin status to reduce expression a target gene.

[0361] The heterologous sequence (e.g., the transcription repressor domain) may be fused to the N- or C-terminus of the inactive Cas9 protein. In an alternative embodiment, the heterologous sequence (e.g., the transcription repressor domain) may be fused to an internal portion (i.e., a portion other than the N-terminus or C-terminus) of the inactive Cas9 protein.

[0362] The ability of a Cas9 molecule/gRNA molecule complex to bind to and cleave a target nucleic acid can be evaluated, e.g., by the methods described herein in Section III. The activity of a Cas9 molecule, e.g., either an active Cas9 or an inactive Cas9, alone or in a complex with a gRNA molecule may also be evaluated by methods well-known in the art, including, gene expression assays and chromatin-based assays, e.g., chromatin immunoprecipitation (ChiP) and chromatin in vivo assay (CiA).

### Other Cas9 Molecule Fusions

[0363] In embodiments, the Cas9 molecule, e.g., a Cas9 of S. pyogenes, may additionally comprise one or more amino acid sequences that confer additional activity.

[0364] In some aspects, the Cas9 molecule may comprise one or more nuclear localization sequences (NLSs), such as at least 1, 2, 3, 4, 5, 6, 7, 8, 9, 10, or more NLSs. In some embodiments, the Cas9 molecule comprises at least 1, 2, 3, 4, 5, 6, 7, 8, 9, 10, or more NLSs at or near the amino-terminus, at least 1, 2, 3, 4, 5, 6, 7, 8, 9, 10, or more NLSs at or near the carboxy-terminus, or a combination of these (e.g. one or more NLS at the amino-terminus and one or more NLS at the carboxy terminus). When more than one NLS is present, each may be selected independently of the others, such that a single NLS may be present in more than one copy and/or in combination with one or more other NLSs present in one or more copies. In some embodiments, an NLS is considered near the N- or C-terminus when the nearest amino acid of the NLS is within about 1, 2, 3, 4, 5, 10, 15, 20, 25, 30, 40, 50, or more amino acids along the polypeptide chain from the N- or C-terminus. Typically, an NLS consists of one or more short sequences of positively charged lysines or arginines exposed on the protein surface, but other types of NLS are known. Non-limiting examples of NLSs include an NLS sequence comprising or derived from: the NLS of the SV40 virus large T-antigen, having the amino acid sequence PKKKRKV (SEQ ID NO: 3134); the NLS from nucleoplasmin (e.g. the nucleoplasmin bipartite NLS with the sequence KRPAATKKAGQAKKKK (SEQ ID NO: 3135); the c-myc NLS having the amino acid sequence PAAKRVKLD (SEQ ID NO: 3136) or RQRRNELKRSP (SEQ ID NO: 3137); the hRNPA1 M9 NLS having the sequence NQSSNFGPMKGGNFGGRSSGPYGGGGQYFAKPRNQGGY (SEQ ID NO: 3138); the sequence RMRIZFKNKGKDTAELRRRRVEVSVELRKAKKDEQILKRRNV (SEQ ID NO: 3139) of the IBB domain from importin-alpha; the sequences VSRKRPRP (SEQ ID NO: 3140) and PPKKARED (SEQ ID NO: 3141) of the myoma T protein; the sequence PQPKKKPL (SEQ ID NO: 3142) of human p53; the sequence SALIKKKKKMAP (SEQ ID NO: 3143) of mouse c-ab1 IV; the sequences DRLRR (SEQ ID NO: 3144) and PKQKKRK (SEQ ID NO: 3145) of the influenza virus NS1; the sequence RKLKKKIKKL (SEQ ID NO: 3146) of the Hepatitis virus delta antigen; the sequence REKKKFLKRR (SEQ ID NO: 3147) of the mouse Mx1 protein; the sequence KRKGDEVDGVDEVAKKKSKK (SEQ ID NO: 3148) of the human poly(ADP-ribose) polymerase; and the sequence RKCLQAGMNLEARKTKK (SEQ ID NO: 3149) of the steroid hormone receptors (human) glucocorticoid. Other suitable NLS sequences are known in the art (e.g., Sorokin, Biochemistry (Moscow) (2007) 72:13, 1439-1457; Lange J Biol Chem. (2007) 282:8, 5101-5).

[0365] In an embodiment, the Cas9 molecule, e.g., S. pyogenes Cas9 molecule, comprises a NLS sequence of SV40, e.g., disposed N terminal to the Cas9 molecule. In an embodiment, the Cas9 molecule, e.g., S. pyogenes Cas9 molecule, comprises a NLS sequence of SV40 disposed N-terminal to the Cas9 molecule and a NLS sequence of SV40 disposed C terminal to the Cas9 molecule. In an embodiment, the Cas9 molecule, e.g., S. pyogenes Cas9 molecule, comprises a NLS sequence of SV40 disposed N-terminal to the Cas9 molecule and a NLS sequence of nucleoplasmin disposed C-terminal to the Cas9 molecule. In any of the aforementioned embodiments, the molecule may additionally comprise a tag, e.g., a His tag, e.g., a His(6) tag (SEQ ID NO: 3175) or His(8) tag (SEQ ID NO: 3176), e.g., at the N terminus or the C terminus.

[0366] In some aspects, the Cas9 molecule may comprise one or more amino acid sequences that allow the Cas9 molecule to be specifically recognized, for example a tag. In one embodiment, the tag is a Histidine tag, e.g., a histidine tag comprising at least 3, 4, 5, 6, 7, 8, 9, 10 or more histidine amino acids.

[0367] In embodiments, the histidine tag is a His6 tag (six histidines) (SEQ ID NO: 3175). In other embodiments, the histidine tag is a His8 tag (eight histidines) (SEQ ID NO: 3176). In embodiments, the histidine tag may be separated from one or more other portions of the Cas9 molecule by a linker. In embodiments, the linker is GGS. An example of such a fusion is the Cas9 molecule iProt106520.

[0368] In some aspects, the Cas9 molecule may comprise one or more amino acid sequences that are recognized by a protease (e.g., comprise a protease cleavage site). In embodiments, the cleavage site is the tobacco etch virus (TEV) cleavage site, e.g., comprises the sequence ENLYFQG (SEQ ID NO: 3158). In some aspects the protease cleavage site, e.g., the TEV cleavage site is disposed between a tag, e.g., a His tag, e.g., a His6 (SEQ ID NO: 3175) or His8 tag (SEQ ID NO: 3176), and the remainder of the Cas9 molecule. Without being bound by theory it is believed that such introduction will allow for the use of the tag for, e.g., purification of the Cas9 molecule, and then subsequent cleavage so the tag does not interfere with the Cas9 molecule function.

[0369] In embodiments, the Cas9 molecule (e.g., a Cas9 molecule as described herein) comprises an N-terminal NLS, and a C-terminal NLS (e.g., comprises, from N- to C-terminal NLS-Cas9-NLS), e.g., wherein each NLS is an SV40 NLS (PKKKRKV (SEQ ID NO: 3134)). In embodiments, the Cas9 molecule (e.g., a Cas9 molecule as described herein) comprises an N-terminal NLS, a C-terminal NLS, and a C-terminal His6 tag (SEQ ID NO: 3175) (e.g., comprises, from N- to C-terminal NLS-Cas9-NLS-His tag), e.g., wherein each NLS is an SV40 NLS (PKKKRKV (SEQ ID NO: 3134)). In embodiments, the Cas9 molecule (e.g., a Cas9 molecule as described herein) comprises an N-terminal His tag (e.g., His6 tag (SEQ ID NO: 3175)), an N-terminal NLS, and a C-terminal NLS (e.g., comprises, from N- to C-terminal His tag-NLS-Cas9-NLS), e.g., wherein each NLS is an SV40 NLS (PKKKRKV (SEQ ID NO: 3134)). In embodiments, the Cas9 molecule (e.g., a Cas9 molecule as described herein) comprises an N-terminal NLS and a C-terminal His tag (e.g., His6 tag (SEQ ID NO: 3175)) (e.g., comprises from N- to C-terminal His tag-Cas9-NLS), e.g., wherein the NLS is an SV40 NLS (PKKKRKV (SEQ ID NO: 3134)). In embodiments, the Cas9 molecule (e.g., a Cas9 molecule as described herein) comprises an N-terminal NLS and a C-terminal His tag (e.g., His6 tag (SEQ ID NO: 3175)) (e.g., comprises from N- to C-terminal NLS-Cas9-His tag), e.g., wherein the NLS is an SV40 NLS (PKKKRKV (SEQ ID NO: 3134)). In embodiments, the Cas9 molecule (e.g., a Cas9 molecule as described herein) comprises an N-terminal His tag (e.g., His8 tag (SEQ ID NO: 3176)), an N-terminal cleavage domain (e.g., a tobacco etch virus (TEV) cleavage domain (e.g., comprises the sequence ENLYFQG (SEQ ID NO: 3158))), an N-terminal NLS (e.g., an SV40 NLS; SEQ ID NO: 3134), and a C-terminal NLS (e.g., an SV40 NLS; SEQ ID NO: 3134) (e.g., comprises from N- to C-terminal His tag-TEV-NLS-Cas9-NLS). In any of the aforementioned embodiments the Cas9 has the sequence of SEQ ID NO: 3133.

[0370] Alternatively, in any of the aforementioned embodiments, the Cas9 has a sequence of a Cas9 variant of SEQ ID NO: 3133, e.g., as described herein. In any of the aforementioned embodiments, the Cas9 molecule comprises a linker between the His tag and another portion of the molecule, e.g., a GGS linker.

[0371] Amino acid sequences of exemplary Cas9 molecules described above are provided below. iProt105026 (also referred to as iProt106154, iProt106331, iProt106545, and PID426303, depending on the preparation of the protein) (SEQ ID NO: 3161):

MAPKKKRKVD KKYSIGLDIG TNSVGWAVIT DEYKVPSKKF KVLGNTDRHS IKKNLIGALL
FDSGETAEAT RLKRTARRRY TRRKNRICYL QEIFSNEMAK VDDSFFHRLE ESFLVEEDKK
HERHPIFGNI VDEVAYHEKY PTIYHLRKKL VDSTDKADLR LIYLALAHMI KFRGHFLIEG
DLNPDNSDVD KLFIQLVQTY NQLFEENPIN ASGVDAKAIL SARLSKSRRL ENLIAQLPGE
KKNGLFGNLI ALSLGLTPNF KSNFDLAEDA KLQLSKDTYD DDLDNLLAQI GDQYADLFLA
AKNLSDAILL SDILRVNTEI TKAPLSASMI KRYDEHHQDL TLLKALVRQQ LPEKYKEIFF
DQSKNGYAGY IDGGASQEEF YKFIKPILEK MDGTEELLVK LNREDLLRKQ RTFDNGSIPH
QIHLGELHAI LRRQEDFYPF LKDNREKIEK ILTFRIPYYV GPLARGNSRF AWMTRKSEET
ITPWNFEEVV DKGASAQSFI ERMTNFDKNL PNEKVLPKHS LLYEYFTVYN ELTKVKYVTE
GMRKPAFLSG EQKKAIVDLL FKTNRKVTVK QLKEDYFKKI ECFDSVEISG VEDRENASLG
TYHDLLKIIK DKDELDNEEN EDILEDIVLT LTLFEDREMI EERLKTYAHL FDDKVMKQLK
RRRYTGWGRL SRKLINGIRD KQSGKTILDF LKSDGFANRN FMQLIHDDSL TFKEDIQKAQ
VSGQGDSLHE HIANLAGSPA IKKGILQTVK VVDELVKVMG RHKPENIVIE MARENQTTQK
GQKNSRERMK RIEEGIKELG SQILKEHPVE NTQLQNEKLY LYYLQNGRDM YVDQELDINR
LSDYDVDHIV PQSFLKDDSI DNKVLTRSDK NRGKSDNVPS EEVVKKMKNY WRQLLNAKLI
TQRKFDNLTK AERGGLSELD KAGFIKRQLV ETRQITKHVA QILDSRMNTK YDENDKLIRE
VKVITLKSKL VSDERKDFQF YKVREINNYH HAHDAYLNAV VGTALIKKYP KLESEFVYGD
YKVYDVRKMI AKSEQEIGKA TAKYFFYSNI MNFFKTEITL ANGEIRKRPL IETNGETGEI
VWDKGRDFAT VRKVLSMPQV NIVKKTEVQT GGFSKESILP KRNSDKLIAR KKDWDPKKYG
GFDSPTVAYS VLVVAKVEKG KSKKLKSVKE LLGITIMERS SFEKNPIDFL EAKGYKEVKK
DLIIKLPKYS LFELENGRKR MLASAGELQK GNELALPSKY VNFLYLASHY EKLKGSPEDN
EQKQLFVEQH KHYLDEIIEQ ISEFSKRVIL ADANLDKVLS AYNKHRDKPI REQAENIIHL
FTLTNLGAPA AFKYFDTTID RKRYTSTKEV LDATLIHQSI TGLYETRIDL SQLGGDSRAD
PKKKRKVHHH HHH
iProt106518 (SEQ ID NO: 3162):
MAPKKKRKVD KKYSIGLDIG TNSVGWAVIT DEYKVPSKKF KVLGNTDRHS IKKNLIGALL
FDSGETAEAT RLKRTARRRY TRRKNRILYL QEIFSNEMAK VDDSFFHRLE ESFLVEEDKK
HERHPIFGNI VDEVAYHEKY PTIYHLRKKL VDSTDKADLR LIYLALAHMI KERGHFLIEG
DLNPDNSDVD KLFIQLVQTY NQLFEENPIN ASGVDAKAIL SARLSKSRRL ENLIAQLPGE
KKNGLFGNLI ALSLGLTPNF KSNFDLAEDA KLQLSKDTYD DDLDNLLAQI GDQYADLFLA
AKNLSDAILL SDILRVNTEI TKAPLSASMI KRYDEHHQDL TLLKALVRQQ LPEKYKEIFF
DQSKNGYAGY IDGGASQEEF YKFIKPILEK MDGTEELLVK LNREDLLRKQ RTFDNGSIPH
QIHLGELHAI LRRQEDFYPF LKDNREKIEK ILTFRIPYYV GPLARGNSRF AWMTRKSEET
ITPWNFEEVV DKGASAQSFI ERMTNFDKNL PNEKVLPKHS LLYEYFTVYN ELTKVKYVTE
GMRKPAFLSG EQKKAIVDLL FKTNRKVTVK QLKEDYFKKI EEFDSVEISG VEDRENASLG
TYHDLLKIIK DKDELDNEEN EDILEDIVLT LTLFEDREMI EERLKTYAHL FDDKVMKQLK
RRRYTGWGRL SRKLINGIRD KQSGKTILDF LKSDGFANRN FMQLIHDDSL TFKEDIQKAQ
VSGQGDSLHE HIANLAGSPA IKKGILQTVK VVDELVKVMG RHKPENIVIE MARENQTTQK
GQKNSRERMK RIEEGIKELG SQILKEHPVE NTQLQNEKLY LYYLQNGRDM YVDQELDINR
LSDYDVDHIV PQSFLKDDSI DNKVLTRSDK NRGKSDNVPS EEVVKKMKNY WRQLLNAKLI
TQRKFDNLTK AERGGLSELD KAGFIKRQLV ETRQITKHVA QILDSRMNTK YDENDKLIRE
VKVITLKSKL VSDERKDFQF YKVREINNYH HAHDAYLNAV VGTALIKKYP KLESEFVYGD
YKVYDVRKMI AKSEQEIGKA TAKYFFYSNI MNFFKTEITL ANGEIRKRPL IETNGETGEI
VWDKGRDFAT VRKVLSMPQV NIVKKTEVQT GGFSKESILP KRNSDKLIAR KKDWDPKKYG
GFDSPTVAYS VLVVAKVEKG KSKKLKSVKE LLGITIMERS SFEKNPIDFL EAKGYKEVKK
DLIIKLPKYS LFELENGRKR MLASAGELQK GNELALPSKY VNFLYLASHY EKLKGSPEDN
EQKQLFVEQH KHYLDEIIEQ ISEFSKRVIL ADANLDKVLS AYNKHRDKPI REQAENIIHL
FTLTNLGAPA AFKYFDTTID RKRYTSTKEV LDATLIHQSI TGLYETRIDL SQLGGDSRAD
PKKKRKVHHH HHH
iProt106519 (SEQ ID NO: 3163):
MGSSHHHHHH HHENLYFQGS MDKKYSIGLD IGTNSVGWAV ITDEYKVPSK KFKVLGNTDR
HSIKKNLIGA LLFDSGETAE ATRLKRTARR RYTRRKNRIC YLQEIFSNEM AKVDDSFFHR
LEESFLVEED KKHERHPIFG NIVDEVAYHE KYPTIYHLRK KLVDSTDKAD LRLIYLALAH
MIKFRGHFLI EGDLNPDNSD VDKLFIQLVQ TYNQLFEENP INASGVDAKA ILSARLSKSR
RLENLIAQLP GEKKNGLFGN LIALSLGLTP NFKSNFDLAE DAKLQLSKDT YDDDLDNLLA
QIGDQYADLF LAAKNLSDAI LLSDILRVNT EITKAPLSAS MIKRYDEHHQ DLTLLKALVR
QQLPEKYKEI FFDQSKNGYA GYIDGGASQE EFYKFIKPIL EKMDGTEELL VKLNREDLLR
KQRTFDNGSI PHQIHLGELH AILRRQEDFY PFLKDNREKI EKILTFRIPY YVGPLARGNS
RFAWMTRKSE ETITPWNFEE VVDKGASAQS FIERMTNEDK NLPNEKVLPK HSLLYEYFTV
YNELTKVKYV TEGMRKPAFL SGEQKKAIVD LLFKTNRKVT VKQLKEDYFK KIECFDSVEI
SGVEDRENAS LGTYHDLLKI IKDKDELDNE ENEDILEDIV LTLTLFEDRE MIEERLKTYA
HLEDDKVMKQ LKRRRYTGWG RLSRKLINGI RDKQSGKTIL DFLKSDGFAN RNFMQLIHDD
SLTFKEDIQK AQVSGQGDSL HEHIANLAGS PAIKKGILQT VKVVDELVKV MGRHKPENIV
IEMARENQTT QKGQKNSRER MKRIEEGIKE LGSQILKEHP VENTQLQNEK LYLYYLQNGR
DMYVDQELDI NRLSDYDVDH IVPQSFLKDD SIDNKVLTRS DKNRGKSDNV PSEEVVKKMK
NYWRQLLNAK LITQRKEDNL TKAERGGLSE LDKAGFIKRQ LVETRQITKH VAQILDSRMN
TKYDENDKLI REVKVITLKS KLVSDFRKDF QFYKVREINN YHHAHDAYLN AVVGTALIKK
YPKLESEFVY GDYKVYDVRK MIAKSEQEIG KATAKYFFYS NIMNFFKTEI TLANGEIRKR
PLIETNGETG EIVWDKGRDF ATVRKVLSMP QVNIVKKTEV QTGGFSKESI LPKRNSDKLI
ARKKDWDPKK YGGFDSPTVA YSVLVVAKVE KGKSKKLKSV KELLGITIME RSSFEKNPID
FLEAKGYKEV KKDLIIKLPK YSLFELENGR KRMLASAGEL QKGNELALPS KYVNFLYLAS
HYEKLKGSPE DNEQKQLFVE QHKHYLDEII EQISEFSKRV ILADANLDKV LSAYNKHRDK
PIREQAENII HLFTLTNLGA PAAFKYEDTT IDRKRYTSTK EVLDATLIHQ SITGLYETRI
DLSQLGGDGG GSPKKKRKV
iProt106520 (SEQ ID NO: 3164):
MAHHHHHHGG SPKKKRKVDK KYSIGLDIGT NSVGWAVITD EYKVPSKKFK VLGNTDRHSI
KKNLIGALLF DSGETAEATR LKRTARRRYT RRKNRICYLQ EIFSNEMAKV DDSFFHRLEE
SFLVEEDKKH ERHPIFGNIV DEVAYHEKYP TIYHLRKKLV DSTDKADLRL IYLALAHMIK
FRGHFLIEGD LNPDNSDVDK LFIQLVQTYN QLFEENPINA SGVDAKAILS ARLSKSRRLE
NLIAQLPGEK KNGLFGNLIA LSLGLTPNFK SNFDLAEDAK LQLSKDTYDD DLDNLLAQIG
DQYADLFLAA KNLSDAILLS DILRVNTEIT KAPLSASMIK RYDEHHQDLT LLKALVRQQL
PEKYKEIFFD QSKNGYAGYI DGGASQEEFY KFIKPILEKM DGTEELLVKL NREDLLRKQR
TFDNGSIPHQ IHLGELHAIL RRQEDFYPFL KDNREKIEKI LTFRIPYYVG PLARGNSRFA
WMTRKSEETI TPWNFEEVVD KGASAQSFIE RMTNFDKNLP NEKVLPKHSL LYEYFTVYNE
LTKVKYVTEG MRKPAFLSGE QKKAIVDLLF KTNRKVTVKQ LKEDYFKKIE CFDSVEISGV
EDRFNASLGT YHDLLKIIKD KDELDNEENE DILEDIVLTL TLFEDREMIE ERLKTYAHLF
DDKVMKQLKR RRYTGWGRLS RKLINGIRDK QSGKTILDFL KSDGFANRNF MQLIHDDSLT
FKEDIQKAQV SGQGDSLHEH IANLAGSPAI KKGILQTVKV VDELVKVMGR HKPENIVIEM
ARENQTTQKG QKNSRERMKR IEEGIKELGS QILKEHPVEN TQLQNEKLYL YYLQNGRDMY
VDQELDINRL SDYDVDHIVP QSFLKDDSID NKVLTRSDKN RGKSDNVPSE EVVKKMKNYW
RQLLNAKLIT QRKFDNLTKA ERGGLSELDK AGFIKRQLVE TRQITKHVAQ ILDSRMNTKY
DENDKLIREV KVITLKSKLV SDFRKDFQFY KVREINNYHH AHDAYLNAVV GTALIKKYPK
LESEFVYGDY KVYDVRKMIA KSEQEIGKAT AKYFFYSNIM NFFKTEITLA NGEIRKRPLI
ETNGETGEIV WDKGRDFATV RKVLSMPQVN IVKKTEVQTG GFSKESILPK RNSDKLIARK
KDWDPKKYGG FDSPTVAYSV LVVAKVEKGK SKKLKSVKEL LGITIMERSS FEKNPIDELE
AKGYKEVKKD LIIKLPKYSL FELENGRKRM LASAGELQKG NELALPSKYV NFLYLASHYE
KLKGSPEDNE QKQLFVEQHK HYLDEIIEQI SEFSKRVILA DANLDKVLSA YNKHRDKPIR
EQAENIIHLF TLTNLGAPAA FKYFDTTIDR KRYTSTKEVL DATLIHQSIT GLYETRIDLS
QLGGDSRADP KKKRKV
iProt106521 (SEQ ID NO: 3165):
MAPKKKRKVD KKYSIGLDIG TNSVGWAVIT DEYKVPSKKF KVLGNTDRHS IKKNLIGALL
FDSGETAEAT RLKRTARRRY TRRKNRICYL QEIFSNEMAK VDDSFFHRLE ESFLVEEDKK
HERHPIFGNI VDEVAYHEKY PTIYHLRKKL VDSTDKADLR LIYLALAHMI KERGHFLIEG
DLNPDNSDVD KLFIQLVQTY NQLFEENPIN ASGVDAKAIL SARLSKSRRL ENLIAQLPGE
KKNGLFGNLI ALSLGLTPNF KSNFDLAEDA KLQLSKDTYD DDLDNLLAQI GDQYADLFLA
AKNLSDAILL SDILRVNTEI TKAPLSASMI KRYDEHHQDL TLLKALVRQQ LPEKYKEIFF
DQSKNGYAGY IDGGASQEEF YKFIKPILEK MDGTEELLVK LNREDLLRKQ RTEDNGSIPH
QIHLGELHAI LRRQEDFYPF LKDNREKIEK ILTFRIPYYV GPLARGNSRF AWMTRKSEET
ITPWNFEEVV DKGASAQSFI ERMTNEDKNL PNEKVLPKHS LLYEYFTVYN ELTKVKYVTE
GMRKPAFLSG EQKKAIVDLL FKTNRKVTVK QLKEDYFKKI ECFDSVEISG VEDRENASLG
TYHDLLKIIK DKDFLDNEEN EDILEDIVLT LTLFEDREMI EERLKTYAHL FDDKVMKQLK
RRRYTGWGRL SRKLINGIRD KQSGKTILDF LKSDGFANRN FMQLIHDDSL TFKEDIQKAQ
VSGQGDSLHE HIANLAGSPA IKKGILQTVK VVDELVKVMG RHKPENIVIE MARENQTTQK
GQKNSRERMK RIEEGIKELG SQILKEHPVE NTQLQNEKLY LYYLQNGRDM YVDQELDINR
LSDYDVDHIV PQSFLKDDSI DNKVLTRSDK NRGKSDNVPS EEVVKKMKNY WRQLLNAKLI
TQRKFDNLTK AERGGLSELD KAGFIKRQLV ETRQITKHVA QILDSRMNTK YDENDKLIRE
VKVITLKSKL VSDFRKDFQF YKVREINNYH HAHDAYLNAV VGTALIKKYP KLESEFVYGD
YKVYDVRKMI AKSEQEIGKA TAKYFFYSNI MNFFKTEITL ANGEIRKRPL IETNGETGEI
VWDKGRDFAT VRKVLSMPQV NIVKKTEVQT GGFSKESILP KRNSDKLIAR KKDWDPKKYG
GFDSPTVAYS VLVVAKVEKG KSKKLKSVKE LLGITIMERS SFEKNPIDFL EAKGYKEVKK
DLIIKLPKYS LFELENGRKR MLASAGELQK GNELALPSKY VNFLYLASHY EKLKGSPEDN
EQKQLFVEQH KHYLDEIIEQ ISEFSKRVIL ADANLDKVLS AYNKHRDKPI REQAENIIHL
FTLTNLGAPA AFKYFDTTID RKRYTSTKEV LDATLIHQSI TGLYETRIDL SQLGGDSRAD
HHHHHH
iProt106522 (SEQ ID NO: 3166):
MAHHHHHHGG SDKKYSIGLD IGTNSVGWAV ITDEYKVPSK KFKVLGNTDR HSIKKNLIGA
LLFDSGETAE ATRLKRTARR RYTRRKNRIC YLQEIFSNEM AKVDDSFFHR LEESFLVEED
KKHERHPIFG NIVDEVAYHE KYPTIYHLRK KLVDSTDKAD LRLIYLALAH MIKFRGHELI
EGDLNPDNSD VDKLFIQLVQ TYNQLFEENP INASGVDAKA ILSARLSKSR RLENLIAQLP
GEKKNGLFGN LIALSLGLTP NEKSNEDLAE DAKLQLSKDT YDDDLDNLLA QIGDQYADLE
LAAKNLSDAI LLSDILRVNT EITKAPLSAS MIKRYDEHHQ DLTLLKALVR QQLPEKYKEI
FFDQSKNGYA GYIDGGASQE EFYKFIKPIL EKMDGTEELL VKLNREDLLR KQRTEDNGSI
PHQIHLGELH AILRRQEDFY PFLKDNREKI EKILTFRIPY YVGPLARGNS RFAWMTRKSE
ETITPWNFEE VVDKGASAQS FIERMTNEDK NLPNEKVLPK HSLLYEYFTV YNELTKVKYV
TEGMRKPAFL SGEQKKAIVD LLFKTNRKVT VKQLKEDYFK KIECFDSVEI SGVEDRENAS
LGTYHDLLKI IKDKDELDNE ENEDILEDIV LTLTLFEDRE MIEERLKTYA HLEDDKVMKQ
LKRRRYTGWG RLSRKLINGI RDKQSGKTIL DFLKSDGFAN RNFMQLIHDD SLTFKEDIQK
AQVSGQGDSL HEHIANLAGS PAIKKGILQT VKVVDELVKV MGRHKPENIV IEMARENQTT
QKGQKNSRER MKRIEEGIKE LGSQILKEHP VENTQLQNEK LYLYYLQNGR DMYVDQELDI
NRLSDYDVDH IVPQSFLKDD SIDNKVLTRS DKNRGKSDNV PSEEVVKKMK NYWRQLLNAK
LITQRKEDNL TKAERGGLSE LDKAGFIKRQ LVETRQITKH VAQILDSRMN TKYDENDKLI
REVKVITLKS KLVSDFRKDF QFYKVREINN YHHAHDAYLN AVVGTALIKK YPKLESEFVY
GDYKVYDVRK MIAKSEQEIG KATAKYFFYS NIMNFFKTEI TLANGEIRKR PLIETNGETG
EIVWDKGRDF ATVRKVLSMP QVNIVKKTEV QTGGFSKESI LPKRNSDKLI ARKKDWDPKK
YGGFDSPTVA YSVLVVAKVE KGKSKKLKSV KELLGITIME RSSFEKNPID FLEAKGYKEV
KKDLIIKLPK YSLFELENGR KRMLASAGEL QKGNELALPS KYVNFLYLAS HYEKLKGSPE
DNEQKQLFVE QHKHYLDEII EQISEFSKRV ILADANLDKV LSAYNKHRDK PIREQAENII
HLFTLTNLGA PAAFKYFDTT IDRKRYTSTK EVLDATLIHQ SITGLYETRI DLSQLGGDSR
ADPKKKRKV
iProt106658 (SEQ ID NO: 3167):
MGSSHHHHHH HHENLYFQGS MDKKYSIGLD IGTNSVGWAV ITDEYKVPSK KFKVLGNTDR
HSIKKNLIGA LLFDSGETAE ATRLKRTARR RYTRRKNRIC YLQEIFSNEM AKVDDSFFHR
LEESFLVEED KKHERHPIFG NIVDEVAYHE KYPTIYHLRK KLVDSTDKAD LRLIYLALAH
MIKFRGHFLI EGDLNPDNSD VDKLFIQLVQ TYNQLFEENP INASGVDAKA ILSARLSKSR
RLENLIAQLP GEKKNGLFGN LIALSLGLTP NFKSNEDLAE DAKLQLSKDT YDDDLDNLLA
QIGDQYADLF LAAKNLSDAI LLSDILRVNT EITKAPLSAS MIKRYDEHHQ DLTLLKALVR
QQLPEKYKEI FFDQSKNGYA GYIDGGASQE EFYKFIKPIL EKMDGTEELL VKLNREDLLR
KQRTFDNGSI PHQIHLGELH AILRRQEDFY PFLKDNREKI EKILTFRIPY YVGPLARGNS
RFAWMTRKSE ETITPWNFEE VVDKGASAQS FIERMTNEDK NLPNEKVLPK HSLLYEYFTV
YNELTKVKYV TEGMRKPAFL SGEQKKAIVD LLFKTNRKVT VKQLKEDYFK KIECFDSVEI
SGVEDRFNAS LGTYHDLLKI IKDKDELDNE ENEDILEDIV LTLTLFEDRE MIEERLKTYA
HLFDDKVMKQ LKRRRYTGWG RLSRKLINGI RDKQSGKTIL DELKSDGFAN RNFMQLIHDD
SLTFKEDIQK AQVSGQGDSL HEHIANLAGS PAIKKGILQT VKVVDELVKV MGRHKPENIV
IEMARENQTT QKGQKNSRER MKRIEEGIKE LGSQILKEHP VENTQLQNEK LYLYYLQNGR
DMYVDQELDI NRLSDYDVDH IVPQSFLKDD SIDNKVLTRS DKNRGKSDNV PSEEVVKKMK
NYWRQLLNAK LITQRKEDNL TKAERGGLSE LDKAGFIKRQ LVETRQITKH VAQILDSRMN
TKYDENDKLI REVKVITLKS KLVSDFRKDF QFYKVREINN YHHAHDAYLN AVVGTALIKK
YPKLESEFVY GDYKVYDVRK MIAKSEQEIG KATAKYFFYS NIMNFFKTEI TLANGEIRKR
PLIETNGETG EIVWDKGRDF ATVRKVLSMP QVNIVKKTEV QTGGFSKESI LPKRNSDKLI
ARKKDWDPKK YGGFDSPTVA YSVLVVAKVE KGKSKKLKSV KELLGITIME RSSFEKNPID
FLEAKGYKEV KKDLIIKLPK YSLFELENGR KRMLASAGEL QKGNELALPS KYVNFLYLAS
HYEKLKGSPE DNEQKQLFVE QHKHYLDEII EQISEFSKRV ILADANLDKV LSAYNKHRDK
PIREQAENII HLFTLTNLGA PAAFKYFDTT IDRKRYTSTK EVLDATLIHQ SITGLYETRI
DLSQLGGDGG GSPKKKRKV
iProt106745 (SEQ ID NO: 3168):
MAPKKKRKVD KKYSIGLDIG TNSVGWAVIT DEYKVPSKKF KVLGNTDRHS IKKNLIGALL
FDSGETAEAT RLKRTARRRY TRRKNRICYL QEIFSNEMAK VDDSFFHRLE ESFLVEEDKK
HERHPIFGNI VDEVAYHEKY PTIYHLRKKL VDSTDKADLR LIYLALAHMI KERGHFLIEG
DLNPDNSDVD KLFIQLVQTY NQLFEENPIN ASGVDAKAIL SARLSKSRRL ENLIAQLPGE
KKNGLFGNLI ALSLGLTPNF KSNFDLAEDA KLQLSKDTYD DDLDNLLAQI GDQYADLFLA
AKNLSDAILL SDILRVNTEI TKAPLSASMI KRYDEHHQDL TLLKALVRQQ LPEKYKEIFF
DQSKNGYAGY IDGGASQEEF YKFIKPILEK MDGTEELLVK LNREDLLRKQ RTFDNGSIPH
QIHLGELHAI LRRQEDFYPF LKDNREKIEK ILTFRIPYYV GPLARGNSRF AWMTRKSEET
ITPWNFEEVV DKGASAQSFI ERMTNFDKNL PNEKVLPKHS LLYEYFTVYN ELTKVKYVTE
GMRKPAFLSG EQKKAIVDLL FKTNRKVTVK QLKEDYFKKI ECFDSVEISG VEDRENASLG
TYHDLLKIIK DKDELDNEEN EDILEDIVLT LTLFEDREMI EERLKTYAHL FDDKVMKQLK
RRRYTGWGRL SRKLINGIRD KQSGKTILDF LKSDGFANRN FMQLIHDDSL TFKEDIQKAQ
VSGQGDSLHE HIANLAGSPA IKKGILQTVK VVDELVKVMG RHKPENIVIE MARENQTTQK
GQKNSRERMK RIEEGIKELG SQILKEHPVE NTQLQNEKLY LYYLQNGRDM YVDQELDINR
LSDYDVDHIV PQSFLKDDSI DNAVLTRSDK NRGKSDNVPS EEVVKKMKNY WRQLLNAKLI
TQRKFDNLTK AERGGLSELD KAGFIKRQLV ETRQITKHVA QILDSRMNTK YDENDKLIRE
VKVITLKSKL VSDERKDFQF YKVREINNYH HAHDAYLNAV VGTALIKKYP KLESEFVYGD
YKVYDVRKMI AKSEQEIGKA TAKYFFYSNI MNFFKTEITL ANGEIRKRPL IETNGETGEI
VWDKGRDFAT VRKVLSMPQV NIVKKTEVQT GGFSKESILP KRNSDKLIAR KKDWDPKKYG
GFDSPTVAYS VLVVAKVEKG KSKKLKSVKE LLGITIMERS SFEKNPIDFL EAKGYKEVKK
DLIIKLPKYS LFELENGRKR MLASAGELQK GNELALPSKY VNFLYLASHY EKLKGSPEDN
EQKQLFVEQH KHYLDEIIEQ ISEFSKRVIL ADANLDKVLS AYNKHRDKPI REQAENIIHL
FTLTNLGAPA AFKYFDTTID RKRYTSTKEV LDATLIHQSI TGLYETRIDL SQLGGDSRAD
PKKKRKVHHH HHH
iProt106746 (SEQ ID NO: 3169):
MAPKKKRKVD KKYSIGLDIG TNSVGWAVIT DEYKVPSKKF KVLGNTDRHS IKKNLIGALL
FDSGETAEAT RLKRTARRRY TRRKNRICYL QEIFSNEMAK VDDSFFHRLE ESFLVEEDKK
HERHPIFGNI VDEVAYHEKY PTIYHLRKKL VDSTDKADLR LIYLALAHMI KERGHFLIEG
DLNPDNSDVD KLFIQLVQTY NQLFEENPIN ASGVDAKAIL SARLSKSRRL ENLIAQLPGE
KKNGLFGNLI ALSLGLTPNF KSNEDLAEDA KLQLSKDTYD DDLDNLLAQI GDQYADLFLA
AKNLSDAILL SDILRVNTEI TKAPLSASMI KRYDEHHQDL TLLKALVRQQ LPEKYKEIFF
DQSKNGYAGY IDGGASQEEF YKFIKPILEK MDGTEELLVK LNREDLLRKQ RTFDNGSIPH
QIHLGELHAI LRRQEDFYPF LKDNREKIEK ILTFRIPYYV GPLARGNSRF AWMTRKSEET
ITPWNFEEVV DKGASAQSFI ERMTNEDKNL PNEKVLPKHS LLYEYFTVYN ELTKVKYVTE
GMRKPAFLSG EQKKAIVDLL FKTNRKVTVK QLKEDYFKKI ECFDSVEISG VEDRENASLG
TYHDLLKIIK DKDELDNEEN EDILEDIVLT LTLFEDREMI EERLKTYAHL FDDKVMKQLK
RRRYTGWGRL SRKLINGIRD KQSGKTILDF LKSDGFANRN FMQLIHDDSL TFKEDIQKAQ
VSGQGDSLHE HIANLAGSPA IKKGILQTVK VVDELVKVMG RHKPENIVIE MARENQTTQK
GQKNSRERMK RIEEGIKELG SQILKEHPVE NTQLQNEALY LYYLQNGRDM YVDQELDINR
LSDYDVDHIV PQSFLKDDSI DNKVLTRSDK NRGKSDNVPS EEVVKKMKNY WRQLLNAKLI
TQRKFDNLTK AERGGLSELD KAGFIKRQLV ETRQITKHVA QILDSRMNTK YDENDKLIRE
VKVITLKSKL VSDFRKDFQF YKVREINNYH HAHDAYLNAV VGTALIKKYP ALESEFVYGD
YKVYDVRKMI AKSEQEIGKA TAKYFFYSNI MNFFKTEITL ANGEIRKAPL IETNGETGEI
VWDKGRDFAT VRKVLSMPQV NIVKKTEVQT GGFSKESILP KRNSDKLIAR KKDWDPKKYG
GFDSPTVAYS VLVVAKVEKG KSKKLKSVKE LLGITIMERS SFEKNPIDEL EAKGYKEVKK
DLIIKLPKYS LFELENGRKR MLASAGELQK GNELALPSKY VNFLYLASHY EKLKGSPEDN
EQKQLFVEQH KHYLDEIIEQ ISEFSKRVIL ADANLDKVLS AYNKHRDKPI REQAENIIHL
FTLTNLGAPA AFKYFDTTID RKRYTSTKEV LDATLIHQSI TGLYETRIDL SQLGGDSRAD
PKKKRKVHHH HHH
iProt106747 (SEQ ID NO: 3170):
MAPKKKRKVD KKYSIGLDIG TNSVGWAVIT DEYKVPSKKF KVLGNTDRHS IKKNLIGALL
FDSGETAEAT RLKRTARRRY TRRKNRICYL QEIFSNEMAK VDDSFFHRLE ESFLVEEDKK
HERHPIFGNI VDEVAYHEKY PTIYHLRKKL VDSTDKADLR LIYLALAHMI KERGHFLIEG
DLNPDNSDVD KLFIQLVQTY NQLFEENPIN ASGVDAKAIL SARLSKSRRL ENLIAQLPGE
KKNGLFGNLI ALSLGLTPNF KSNFDLAEDA KLQLSKDTYD DDLDNLLAQI GDQYADLFLA
AKNLSDAILL SDILRVNTEI TKAPLSASMI KRYDEHHQDL TLLKALVRQQ LPEKYKEIFF
DQSKNGYAGY IDGGASQEEF YKFIKPILEK MDGTEELLVK LNREDLLRKQ RTFDNGSIPH
QIHLGELHAI LRRQEDFYPF LKDNREKIEK ILTFRIPYYV GPLARGNSRF AWMTRKSEET
ITPWNFEEVV DKGASAQSFI ERMTNEDKNL PNEKVLPKHS LLYEYFTVYN ELTKVKYVTE
GMRKPAFLSG EQKKAIVDLL FKTNRKVTVK QLKEDYFKKI ECFDSVEISG VEDRENASLG
TYHDLLKIIK DKDELDNEEN EDILEDIVLT LTLFEDREMI EERLKTYAHL FDDKVMKQLK
RRRYTGWGRL SRKLINGIRD KQSGKTILDF LKSDGFANRN FMQLIHDDSL TFKEDIQKAQ
VSGQGDSLHE HIANLAGSPA IKKGILQTVK VVDELVKVMG RHKPENIVIE MARENQTTQK
GQKNSRERMK RIEEGIKELG SQILKEHPVE NTQLQNEKLY LYYLQNGRDM YVDQELDINR
LSDYDVDHIV PQSFLADDSI DNKVLTRSDK NRGKSDNVPS EEVVKKMKNY WRQLLNAKLI
TQRKFDNLTK AERGGLSELD KAGFIKRQLV ETRQITKHVA QILDSRMNTK YDENDKLIRE
VKVITLKSKL VSDFRKDFQF YKVREINNYH HAHDAYLNAV VGTALIKKYP ALESEFVYGD
YKVYDVRKMI AKSEQEIGKA TAKYFFYSNI MNFFKTEITL ANGEIRKAPL IETNGETGEI
VWDKGRDFAT VRKVLSMPQV NIVKKTEVQT GGFSKESILP KRNSDKLIAR KKDWDPKKYG
GFDSPTVAYS VLVVAKVEKG KSKKLKSVKE LLGITIMERS SFEKNPIDEL EAKGYKEVKK
DLIIKLPKYS LFELENGRKR MLASAGELQK GNELALPSKY VNFLYLASHY EKLKGSPEDN
EQKQLFVEQH KHYLDEIIEQ ISEFSKRVIL ADANLDKVLS AYNKHRDKPI REQAENIIHL
FTLTNLGAPA AFKYFDTTID RKRYTSTKEV LDATLIHQSI TGLYETRIDL SQLGGDSRAD
PKKKRKVHHH HHH
iProt106884 (SEQ ID NO: 3171):
MAPKKKRKVD KKYSIGLDIG TNSVGWAVIT DEYKVPSKKF KVLGNTDRHS IKKNLIGALL
FDSGETAEAT RLKRTARRRY TRRKNRICYL QEIFSNEMAK VDDSFFHRLE ESFLVEEDKK
HERHPIFGNI VDEVAYHEKY PTIYHLRKKL VDSTDKADLR LIYLALAHMI KERGHFLIEG
DLNPDNSDVD KLFIQLVQTY NQLFEENPIN ASGVDAKAIL SARLSKSRRL ENLIAQLPGE
KKNGLFGNLI ALSLGLTPNF KSNFDLAEDA KLQLSKDTYD DDLDNLLAQI GDQYADLFLA
AKNLSDAILL SDILRVNTEI TKAPLSASMI KRYDEHHQDL TLLKALVRQQ LPEKYKEIFF
DQSKNGYAGY IDGGASQEEF YKFIKPILEK MDGTEELLVK LNREDLLRKQ RTFDNGSIPH
QIHLGELHAI LRRQEDFYPF LKDNREKIEK ILTFRIPYYV GPLARGNSRF AWMTRKSEET
ITPWNFEEVV DKGASAQSFI ERMTAFDKNL PNEKVLPKHS LLYEYFTVYN ELTKVKYVTE
GMRKPAFLSG EQKKAIVDLL FKTNRKVTVK QLKEDYFKKI ECFDSVEISG VEDRENASLG
TYHDLLKIIK DKDELDNEEN EDILEDIVLT LTLFEDREMI EERLKTYAHL FDDKVMKQLK
RRRYTGWGAL SRKLINGIRD KQSGKTILDF LKSDGFANRN FMALIHDDSL TFKEDIQKAQ
VSGQGDSLHE HIANLAGSPA IKKGILQTVK VVDELVKVMG RHKPENIVIE MARENQTTQK
GQKNSRERMK RIEEGIKELG SQILKEHPVE NTQLQNEKLY LYYLQNGRDM YVDQELDINR
LSDYDVDHIV PQSFLKDDSI DNKVLTRSDK NRGKSDNVPS EEVVKKMKNY WRQLLNAKLI
TQRKFDNLTK AERGGLSELD KAGFIKRQLV ETRAITKHVA QILDSRMNTK YDENDKLIRE
VKVITLKSKL VSDFRKDFQF YKVREINNYH HAHDAYLNAV VGTALIKKYP KLESEFVYGD
YKVYDVRKMI AKSEQEIGKA TAKYFFYSNI MNFFKTEITL ANGEIRKRPL IETNGETGEI
VWDKGRDFAT VRKVLSMPQV NIVKKTEVQT GGFSKESILP KRNSDKLIAR KKDWDPKKYG
GFDSPTVAYS VLVVAKVEKG KSKKLKSVKE LLGITIMERS SFEKNPIDFL EAKGYKEVKK
DLIIKLPKYS LFELENGRKR MLASAGELQK GNELALPSKY VNFLYLASHY EKLKGSPEDN
EQKQLFVEQH KHYLDEIIEQ ISEFSKRVIL ADANLDKVLS AYNKHRDKPI REQAENIIHL
FTLTNLGAPA AFKYFDTTID RKRYTSTKEV LDATLIHQSI TGLYETRIDL SQLGGDSRAD
PKKKRKVHHH HHH
iProt 20109496 (SEQ ID NO: 3172)
MAPKKKRKVDKKYSIGLDIGTNSVGWAVITDEYKVPSKKFKVLGNTDRHSIKKNLIGALLFDSGETAE
ATRLKRTARRRYTRRKNRILYLQEIFSNEMAKVDDSFFHRLEESFLVEEDKKHERHPIFGNIVDEVAY
HEKYPTIYHLRKKLVDSTDKADLRLIYLALAHMIKFRGHFLIEGDLNPDNSDVDKLFIQLVQTYNQLF
EENPINASGVDAKAILSARLSKSRRLENLIAQLPGEKKNGLFGNLIALSLGLTPNFKSNEDLAEDAKL
QLSKDTYDDDLDNLLAQIGDQYADLFLAAKNLSDAILLSDILRVNTEITKAPLSASMIKRYDEHHQDL
TLLKALVRQQLPEKYKEIFFDQSKNGYAGYIDGGASQEEFYKFIKPILEKMDGTEELLVKLNREDLLR
KQRTFDNGSIPHQIHLGELHAILRRQEDFYPFLKDNREKIEKILTFRIPYYVGPLARGNSRFAWMTRK
SEETITPWNFEEVVDKGASAQSFIERMTNEDKNLPNEKVLPKHSLLYEYFTVYNELTKVKYVTEGMRK
PAFLSGEQKKAIVDLLFKTNRKVTVKQLKEDYFKKIEEFDSVEISGVEDRFNASLGTYHDLLKIIKDK
DFLDNEENEDILEDIVLTLTLFEDREMIEERLKTYAHLFDDKVMKQLKRRRYTGWGRLSRKLINGIRD
KQSGKTILDFLKSDGFANRNFMQLIHDDSLTFKEDIQKAQVSGQGDSLHEHIANLAGSPAIKKGILQT
VKVVDELVKVMGRHKPENIVIEMARENQTTQKGQKNSRERMKRIEEGIKELGSQILKEHPVENTQLQN
EKLYLYYLQNGRDMYVDQELDINRLSDYDVDHIVPQSFLKDDSIDNKVLTRSDKNRGKSDNVPSEEVV
KKMKNYWRQLLNAKLITQRKFDNLTKAERGGLSELDKAGFIKRQLVETRQITKHVAQILDSRMNTKYD
ENDKLIREVKVITLKSKLVSDFRKDFQFYKVREINNYHHAHDAYLNAVVGTALIKKYPKLESEFVYGD
YKVYDVRKMIAKSEQEIGKATAKYFFYSNIMNFFKTEITLANGEIRKRPLIETNGETGEIVWDKGRDF
ATVRKVLSMPQVNIVKKTEVQTGGFSKESILPKRNSDKLIARKKDWDPKKYGGFDSPTVAYSVLVVAK
VEKGKSKKLKSVKELLGITIMERSSFEKNPIDFLEAKGYKEVKKDLIIKLPKYSLFELENGRKRMLAS
AGELQKGNELALPSKYVNFLYLASHYEKLKGSPEDNEQKQLFVEQHKHYLDEIIEQISEFSKRVILAD
ANLDKVLSAYNKHRDKPIREQAENIIHLFTLTNLGAPAAFKYFDTTIDRKRYTSTKEVLDATLIHQSI
TGLYETRIDLSQLGGDSRADHHHHHH

### Nucleic Acids Encoding Cas9 Molecules

[0372] Nucleic acids encoding the Cas9 molecules, e.g., an active Cas9 molecule or an inactive Cas9 molecule are provided herein.

[0373] Exemplary nucleic acids encoding Cas9 molecules are described in Cong et al, SCIENCE 2013, 399(6121):819-823; Wang et al, CELL 2013, 153(4):910-918; Mali et al., SCIENCE 2013, 399(6121):823-826; Jinek et al, SCIENCE 2012, 337(6096):816-821.

[0374] In an embodiment, a nucleic acid encoding a Cas9 molecule can be a synthetic nucleic acid sequence. For example, the synthetic nucleic acid molecule can be chemically modified, e.g., as described in Section XIII. In an embodiment, the Cas9 mRNA has one or more of, e.g., all of the following properties: it is capped, polyadenylated, substituted with 5-methylcytidine and/or pseudouridine.

[0375] In addition or alternatively, the synthetic nucleic acid sequence can be codon optimized, e.g., at least one non-common codon or less-common codon has been replaced by a common codon. For example, the synthetic nucleic acid can direct the synthesis of an optimized messenger mRNA, e.g., optimized for expression in a mammalian expression system, e.g., described herein.

[0376] Provided below is an exemplary codon optimized nucleic acid sequence encoding a Cas9 molecule of S. pyogenes.

(SEQ ID NO: 3150)
ATGGATAAAAAGTACAGCATCGGGCTGGACATCGGTACAAACTCAGTGGGGTGGGCCGTGATTACGGA
CGAGTACAAGGTACCCTCCAAAAAATTTAAAGTGCTGGGTAACACGGACAGACACTCTATAAAGAAAA
ATCTTATTGGAGCCTTGCTGTTCGACTCAGGCGAGACAGCCGAAGCCACAAGGTTGAAGCGGACCGCC
AGGAGGCGGTATACCAGGAGAAAGAACCGCATATGCTACCTGCAAGAAATCTTCAGTAACGAGATGGC
AAAGGTTGACGATAGCTTTTTCCATCGCCTGGAAGAATCCTTTCTTGTTGAGGAAGACAAGAAGCACG
AACGGCACCCCATCTTTGGCAATATTGTCGACGAAGTGGCATATCACGAAAAGTACCCGACTATCTAC
CACCTCAGGAAGAAGCTGGTGGACTCTACCGATAAGGCGGACCTCAGACTTATTTATTTGGCACTCGC
CCACATGATTAAATTTAGAGGACATTTCTTGATCGAGGGCGACCTGAACCCGGACAACAGTGACGTCG
ATAAGCTGTTCATCCAACTTGTGCAGACCTACAATCAACTGTTCGAAGAAAACCCTATAAATGCTTCA
GGAGTCGACGCTAAAGCAATCCTGTCCGCGCGCCTCTCAAAATCTAGAAGACTTGAGAATCTGATTGC
TCAGTTGCCCGGGGAAAAGAAAAATGGATTGTTTGGCAACCTGATCGCCCTCAGTCTCGGACTGACCC
CAAATTTCAAAAGTAACTTCGACCTGGCCGAAGACGCTAAGCTCCAGCTGTCCAAGGACACATACGAT
GACGACCTCGACAATCTGCTGGCCCAGATTGGGGATCAGTACGCCGATCTCTTTTTGGCAGCAAAGAA
CCTGTCCGACGCCATCCTGTTGAGCGATATCTTGAGAGTGAACACCGAAATTACTAAAGCACCCCTTA
GCGCATCTATGATCAAGCGGTACGACGAGCATCATCAGGATCTGACCCTGCTGAAGGCTCTTGTGAGG
CAACAGCTCCCCGAAAAATACAAGGAAATCTTCTTTGACCAGAGCAAAAACGGCTACGCTGGCTATAT
AGATGGTGGGGCCAGTCAGGAGGAATTCTATAAATTCATCAAGCCCATTCTCGAGAAAATGGACGGCA
CAGAGGAGTTGCTGGTCAAACTTAACAGGGAGGACCTGCTGCGGAAGCAGCGGACCTTTGACAACGGG
TCTATCCCCCACCAGATTCATCTGGGCGAACTGCACGCAATCCTGAGGAGGCAGGAGGATTTTTATCC
TTTTCTTAAAGATAACCGCGAGAAAATAGAAAAGATTCTTACATTCAGGATCCCGTACTACGTGGGAC
CTCTCGCCCGGGGCAATTCACGGTTTGCCTGGATGACAAGGAAGTCAGAGGAGACTATTACACCTTGG
AACTTCGAAGAAGTGGTGGACAAGGGTGCATCTGCCCAGTCTTTCATCGAGCGGATGACAAATTTTGA
CAAGAACCTCCCTAATGAGAAGGTGCTGCCCAAACATTCTCTGCTCTACGAGTACTTTACCGTCTACA
ATGAACTGACTAAAGTCAAGTACGTCACCGAGGGAATGAGGAAGCCGGCATTCCTTAGTGGAGAACAG
AAGAAGGCGATTGTAGACCTGTTGTTCAAGACCAACAGGAAGGTGACTGTGAAGCAACTTAAAGAAGA
CTACTTTAAGAAGATCGAATGTTTTGACAGTGTGGAAATTTCAGGGGTTGAAGACCGCTTCAATGCGT
CATTGGGGACTTACCATGATCTTCTCAAGATCATAAAGGACAAAGACTTCCTGGACAACGAAGAAAAT
GAGGATATTCTCGAAGACATCGTCCTCACCCTGACCCTGTTCGAAGACAGGGAAATGATAGAAGAGCG
CTTGAAAACCTATGCCCACCTCTTCGACGATAAAGTTATGAAGCAGCTGAAGCGCAGGAGATACACAG
GATGGGGAAGATTGTCAAGGAAGCTGATCAATGGAATTAGGGATAAACAGAGTGGCAAGACCATACTG
GATTTCCTCAAATCTGATGGCTTCGCCAATAGGAACTTCATGCAACTGATTCACGATGACTCTCTTAC
CTTCAAGGAGGACATTCAAAAGGCTCAGGTGAGCGGGCAGGGAGACTCCCTTCATGAACACATCGCGA
ATTTGGCAGGTTCCCCCGCTATTAAAAAGGGCATCCTTCAAACTGTCAAGGTGGTGGATGAATTGGTC
AAGGTAATGGGCAGACATAAGCCAGAAAATATTGTGATCGAGATGGCCCGCGAAAACCAGACCACACA
GAAGGGCCAGAAAAATAGTAGAGAGCGGATGAAGAGGATCGAGGAGGGCATCAAAGAGCTGGGATCTC
AGATTCTCAAAGAACACCCCGTAGAAAACACACAGCTGCAGAACGAAAAATTGTACTTGTACTATCTG
CAGAACGGCAGAGACATGTACGTCGACCAAGAACTTGATATTAATAGACTGTCCGACTATGACGTAGA
CCATATCGTGCCCCAGTCCTTCCTGAAGGACGACTCCATTGATAACAAAGTCTTGACAAGAAGCGACA
AGAACAGGGGTAAAAGTGATAATGTGCCTAGCGAGGAGGTGGTGAAAAAAATGAAGAACTACTGGCGA
CAGCTGCTTAATGCAAAGCTCATTACACAACGGAAGTTCGATAATCTGACGAAAGCAGAGAGAGGTGG
CTTGTCTGAGTTGGACAAGGCAGGGTTTATTAAGCGGCAGCTGGTGGAAACTAGGCAGATCACAAAGC
ACGTGGCGCAGATTTTGGACAGCCGGATGAACACAAAATACGACGAAAATGATAAACTGATACGAGAG
GTCAAAGTTATCACGCTGAAAAGCAAGCTGGTGTCCGATTTTCGGAAAGACTTCCAGTTCTACAAAGT
TCGCGAGATTAATAACTACCATCATGCTCACGATGCGTACCTGAACGCTGTTGTCGGGACCGCCTTGA
TAAAGAAGTACCCAAAGCTGGAATCCGAGTTCGTATACGGGGATTACAAAGTGTACGATGTGAGGAAA
ATGATAGCCAAGTCCGAGCAGGAGATTGGAAAGGCCACAGCTAAGTACTTCTTTTATTCTAACATCAT
GAATTTTTTTAAGACGGAAATTACCCTGGCCAACGGAGAGATCAGAAAGCGGCCCCTTATAGAGACAA
ATGGTGAAACAGGTGAAATCGTCTGGGATAAGGGCAGGGATTTCGCTACTGTGAGGAAGGTGCTGAGT
ATGCCACAGGTAAATATCGTGAAAAAAACCGAAGTACAGACCGGAGGATTTTCCAAGGAAAGCATTTT
GCCTAAAAGAAACTCAGACAAGCTCATCGCCCGCAAGAAAGATTGGGACCCTAAGAAATACGGGGGAT
TTGACTCACCCACCGTAGCCTATTCTGTGCTGGTGGTAGCTAAGGTGGAAAAAGGAAAGTCTAAGAAG
CTGAAGTCCGTGAAGGAACTCTTGGGAATCACTATCATGGAAAGATCATCCTTTGAAAAGAACCCTAT
CGATTTCCTGGAGGCTAAGGGTTACAAGGAGGTCAAGAAAGACCTCATCATTAAACTGCCAAAATACT
CTCTCTTCGAGCTGGAAAATGGCAGGAAGAGAATGTTGGCCAGCGCCGGAGAGCTGCAAAAGGGAAAC
GAGCTTGCTCTGCCCTCCAAATATGTTAATTTTCTCTATCTCGCTTCCCACTATGAAAAGCTGAAAGG
GTCTCCCGAAGATAACGAGCAGAAGCAGCTGTTCGTCGAACAGCACAAGCACTATCTGGATGAAATAA
TCGAACAAATAAGCGAGTTCAGCAAAAGGGTTATCCTGGCGGATGCTAATTTGGACAAAGTACTGTCT
GCTTATAACAAGCACCGGGATAAGCCTATTAGGGAACAAGCCGAGAATATAATTCACCTCTTTACACT
CACGAATCTCGGAGCCCCCGCCGCCTTCAAATACTTTGATACGACTATCGACCGGAAACGGTATACCA
GTACCAAAGAGGTCCTCGATGCCACCCTCATCCACCAGTCAATTACTGGCCTGTACGAAACACGGATC
GACCTCTCTCAACTGGGCGGCGACTAG

[0377] Provided below is an exemplary codon optimized nucleic acid sequence encoding a Cas9 molecule including SEQ ID NO: 3172:

(SEQ ID NO: 3151)
ATGGCTCCGAAGAAAAAGCGTAAAGTGGATAAAAAATACAGCATTGGTCTGGACATTGGCACGAACTC
AGTGGGTTGGGCGGTCATCACGGATGAATATAAGGTCCCGTCAAAAAAGTTCAAAGTGCTGGGCAACA
CCGATCGCCATTCGATTAAAAAGAATCTGATCGGCGCGCTGCTGTTTGATAGCGGTGAAACCGCGGAA
GCAACGCGTCTGAAACGTACCGCACGTCGCCGTTACACGCGCCGTAAAAATCGTATTCTGTATCTGCA
GGAAATCTTTAGCAACGAAATGGCGAAAGTTGATGACTCATTTTTCCACCGCCTGGAAGAATCGTTTC
TGGTCGAAGAAGACAAAAAGCATGAACGTCACCCGATTTTCGGTAATATCGTTGATGAAGTCGCGTAC
CATGAAAAATATCCGACGATTTACCATCTGCGTAAAAAACTGGTGGATTCAACCGACAAAGCCGATCT
GCGCCTGATTTACCTGGCACTGGCTCATATGATCAAATTTCGTGGCCACTTCCTGATTGAAGGTGACC
TGAACCCGGATAACTCTGACGTTGATAAGCTGTTCATCCAGCTGGTCCAAACCTATAATCAGCTGTTC
GAAGAAAACCCGATCAATGCAAGTGGCGTTGATGCGAAGGCCATTCTGTCCGCTCGCCTGAGTAAATC
CCGCCGTCTGGAAAACCTGATTGCACAACTGCCGGGCGAAAAGAAAAACGGCCTGTTTGGTAATCTGA
TCGCTCTGTCACTGGGTCTGACGCCGAACTTTAAATCGAATTTCGACCTGGCAGAAGATGCTAAGCTG
CAGCTGAGCAAAGATACCTACGATGACGATCTGGACAACCTGCTGGCGCAAATTGGTGACCAGTATGC
CGACCTGTTTCTGGCGGCCAAAAATCTGTCAGATGCCATTCTGCTGTCGGACATCCTGCGCGTGAACA
CCGAAATCACGAAAGCGCCGCTGTCAGCCTCGATGATTAAACGCTACGATGAACATCACCAGGACCTG
ACCCTGCTGAAAGCACTGGTTCGTCAGCAACTGCCGGAAAAGTACAAGGAAATTTTCTTTGACCAATC
TAAGAACGGCTATGCAGGTTACATCGATGGCGGTGCTAGTCAGGAAGAATTCTACAAGTTCATCAAGC
CGATCCTGGAAAAAATGGATGGCACGGAAGAACTGCTGGTGAAACTGAATCGTGAAGATCTGCTGCGT
AAACAACGCACCTTTGACAACGGCAGCATTCCGCATCAGATCCACCTGGGTGAACTGCATGCGATTCT
GCGCCGTCAGGAAGATTTTTATCCGTTCCTGAAAGACAACCGTGAAAAAATTGAAAAGATCCTGACGT
TTCGCATCCCGTATTACGTTGGCCCGCTGGCGCGTGGTAATAGCCGCTTCGCCTGGATGACCCGCAAA
TCTGAAGAAACCATTACGCCGTGGAACTTTGAAGAAGTGGTTGATAAAGGTGCAAGCGCTCAGTCTTT
TATCGAACGTATGACCAATTTCGATAAAAACCTGCCGAATGAAAAGGTCCTGCCGAAACATAGCCTGC
TGTATGAATACTTTACCGTGTACAACGAACTGACGAAAGTGAAGTATGTTACCGAAGGCATGCGCAAA
CCGGCGTTTCTGTCTGGTGAACAGAAAAAAGCCATTGTGGATCTGCTGTTCAAGACCAATCGTAAAGT
TACGGTCAAACAGCTGAAGGAAGATTACTTCAAAAAGATCGAAGAATTCGACAGCGTGGAAATTTCTG
GCGTTGAAGATCGTTTCAACGCCAGTCTGGGTACCTATCATGACCTGCTGAAGATCATCAAGGACAAG
GATTTTCTGGATAACGAAGAAAATGAAGACATTCTGGAAGATATCGTGCTGACCCTGACGCTGTTCGA
AGATCGTGAAATGATTGAAGAACGCCTGAAAACGTACGCACACCTGTTTGACGATAAAGTTATGAAGC
AGCTGAAACGCCGTCGCTATACCGGCTGGGGTCGTCTGTCTCGCAAACTGATTAATGGCATCCGCGAT
AAGCAAAGTGGTAAAACGATTCTGGATTTCCTGAAATCCGACGGCTTTGCCAACCGTAATTTCATGCA
GCTGATCCATGACGATAGTCTGACCTTTAAGGAAGACATTCAGAAAGCACAAGTGTCAGGCCAGGGTG
ATTCGCTGCATGAACACATTGCGAACCTGGCCGGCTCCCCGGCTATTAAAAAGGGTATCCTGCAGACC
GTCAAAGTCGTGGATGAACTGGTGAAGGTTATGGGCCGTCACAAACCGGAAAACATTGTGATCGAAAT
GGCGCGCGAAAATCAGACCACGCAAAAGGGTCAGAAAAACTCACGTGAACGCATGAAGCGCATTGAAG
AAGGCATCAAAGAACTGGGTTCGCAGATTCTGAAAGAACATCCGGTTGAAAACACCCAGCTGCAAAAT
GAAAAACTGTACCTGTATTACCTGCAAAATGGCCGTGACATGTATGTCGATCAGGAACTGGACATCAA
CCGCCTGAGCGACTATGATGTCGACCACATTGTGCCGCAGAGCTTTCTGAAGGACGATTCTATCGATA
ATAAAGTGCTGACCCGTTCTGATAAGAACCGCGGTAAAAGCGACAATGTTCCGTCTGAAGAAGTTGTC
AAAAAGATGAAGAACTACTGGCGTCAACTGCTGAATGCGAAGCTGATTACGCAGCGTAAATTCGATAA
CCTGACCAAGGCGGAACGCGGCGGTCTGAGTGAACTGGATAAGGCCGGCTTTATCAAACGTCAACTGG
TGGAAACCCGCCAGATTACGAAACATGTTGCCCAGATCCTGGATTCCCGCATGAACACGAAATATGAC
GAAAATGATAAGCTGATTCGTGAAGTCAAAGTGATCACCCTGAAGAGTAAGCTGGTGTCCGATTTCCG
TAAGGACTTTCAGTTCTACAAAGTTCGCGAAATTAACAATTACCATCACGCACACGATGCTTATCTGA
ATGCAGTGGTTGGCACCGCTCTGATCAAAAAGTATCCGAAACTGGAAAGCGAATTTGTGTATGGTGAT
TACAAAGTCTATGACGTGCGCAAGATGATTGCGAAAAGTGAACAGGAAATCGGCAAGGCGACCGCCAA
GTACTTTTTCTATTCCAACATCATGAACTTTTTCAAGACCGAAATCACGCTGGCAAATGGCGAAATTC
GTAAACGCCCGCTGATCGAAACCAACGGCGAAACGGGTGAAATTGTGTGGGATAAAGGTCGTGACTTC
GCGACCGTTCGCAAAGTCCTGTCAATGCCGCAAGTGAATATCGTTAAAAAGACCGAAGTTCAGACGGG
CGGTTTTAGTAAAGAATCCATCCTGCCGAAGCGTAACTCGGATAAACTGATTGCGCGCAAAAAGGATT
GGGACCCGAAAAAGTACGGCGGTTTTGATAGTCCGACCGTTGCATATTCCGTCCTGGTCGTGGCTAAA
GTTGAAAAAGGCAAGAGTAAAAAGCTGAAGTCCGTCAAAGAACTGCTGGGTATTACCATCATGGAACG
TAGCTCTTTTGAAAAGAACCCGATTGACTTCCTGGAAGCCAAGGGCTACAAAGAAGTGAAAAAGGATC
TGATTATCAAGCTGCCGAAATATTCGCTGTTCGAACTGGAAAACGGTCGTAAACGCATGCTGGCAAGC
GCTGGCGAACTGCAGAAGGGTAATGAACTGGCACTGCCGTCTAAATATGTGAACTTTCTGTACCTGGC
TAGCCATTATGAAAAACTGAAGGGTTCTCCGGAAGATAACGAACAGAAGCAACTGTTCGTTGAACAAC
ATAAACACTACCTGGATGAAATCATCGAACAGATCTCAGAATTCTCGAAACGCGTCATTCTGGCGGAT
GCCAATCTGGACAAAGTGCTGAGCGCGTATAACAAGCATCGTGATAAACCGATTCGCGAACAGGCCGA
AAATATTATCCACCTGTTTACCCTGACGAACCTGGGCGCACCGGCAGCTTTTAAATACTTCGATACCA
CGATCGACCGTAAGCGCTATACCAGCACGAAAGAAGTTCTGGATGCTACCCTGATTCATCAGTCAATC
ACCGGTCTGTATGAAACGCGTATTGACCTGAGCCAACTGGGCGGTGATAGCCGTGCCGACCATCACCA
TCACCATCACTAATAG

[0378] If the above Cas9 sequences are fused with a peptide or polypeptide at the C-terminus (e.g., an inactive Cas9 fused with a transcription repressor at the C-terminus), it is understood that the stop codon will be removed.

[0379] Also provided herein are nucleic acids, vectors and cells for production of a Cas9 molecule, for example a Cas9 molecule described herein. The recombinant production of polypeptide molecules can be accomplished using techniques known to a skilled artisan. Described herein are molecules and methods for the recombinant production of polypeptide molecules, such as Cas9 molecules, e.g., as described herein. As used in connection herewith, “recombinant” molecules and production includes all polypeptides (e.g., Cas9 molecules, for example as described herein) that are prepared, expressed, created or isolated by recombinant means, such as polypeptides isolated from an animal (e.g., a mouse) that is transgenic or transchromosomal for nucleic acid encoding the molecule of interest, a hybridoma prepared therefrom, molecules isolated from a host cell transformed to express the molecule, e.g., from a transfectoma, molecules isolated from a recombinant, combinatorial library, and molecules prepared, expressed, created or isolated by any other means that involve splicing of all or a portion of a gene encoding the molecule (or portion thereof) to other DNA sequences. Recombinant production may be from a host cell, for example, a host cell comprising nucleic acid encoding a molecule described herein, e.g., a Cas9 molecule, e.g., a Cas9 molecule described herein.

[0380] Provided herein are nucleic acid molecules encoding a molecule (e.g., Cas9 molecule and/or gRNA molecule), e.g., as described herein. Specifically provided are nucleic acid molecules comprising sequence encoding any one of SEQ ID NO: 3161 to SEQ ID NO: 3172, or encoding a fragment of any of SEQ ID NO: 3161 to SEQ ID NO: 3172, or encoding a polypeptide comprising at least 90%, at least 91%, at least 92%, at least 93%, at least 94%, at least 95%, at least 96%, at least 97%, at least 98%, or at least 99% sequence homology to any of SEQ ID NO: 3161 to SEQ ID NO: 3172.

[0381] Provided herein are vectors, e.g., as described herein, comprising any of the above-described nucleic acid molecules. In embodiments, said nucleic acid molecules are operably linked to a promoter, for example a promoter operable in the host cell into which the vector is introduced.

[0382] Provided herein are host cells comprising one or more nucleic acid molecules and/or vectors described herein. In embodiments, the host cell is a prokaryotic host cell. In embodiments, the host cell is a eukaryotic host cell. In embodiments, the host cell is a yeast or E. coli cell. In embodiments, the host cell is a mammalian cell, e.g., a human cell. Such host cells may be used for the production of a recombinant molecule described herein, e.g., a Cas9 or gRNA molecule, e.g., as described herein.

### Other Cas Molecules

[0383] Any Cas9 variants or Class II CRISPR endonuclease can be used in any compositions and methods described herein.

[0384] The term “Cas9 variant” refers to proteins that have at least 80%, 85%, 90%, 95%, 96%, 97%, 98%, 99% or 100% amino acid sequence identity across the whole sequence or a functional portion of the sequence (e.g. a 50, 100, 150 or 200 continuous amino acid portion) compared to wild-type Cas9 protein and have one or more mutations that increase its binding specificity to PAM compared to wild type Cas9 protein. Exemplary Cas9 variants are listed in the Table 6 below.

TABLE 6

| Cas9 Variants | PAM domains | References |
|---|---|---|
| Strep pyogenes (Sp) Cas9 | NGG | Hsu et al. 2014 |
| | | Cell |
| Staph aureus (Sa) Cas9 | NNGRRT or NNGRR | Ran et al. 2015 |
| | NNGGGT, NNGAAT, | Nature |
| | NNGAGT | |
| | (Zetsche) | |
| SpCas9 VQR mutant | NGAG > NGAT = | Kleinstiver et al. |
| (D1135V, R1335Q, T1337R) | NGAA > NGAC | 2015 Nature |
| | NGCG | |
| SpCas9 VRER mutant | NGCG | Kleinstiver et al. |
| (D1135V/G1218R/ | | 2015 Nature |
| R1335E/T1337R) | | |
| SpCas9 D1135E | NGG, greater fidelity, | Kleinstiver et al. |
| | less cutting at | 2015 Nature |
| | NAG and NGA sites | |
| eSpCas9 1.1 mutant | NGG | Slaymaker et al. |
| (K848A/K1003A/R1060A) | | Science 2015 |
| SpCas9 HF1 | NGG | Kleinstiver et al. |
| (Q695A, Q926A, | | 2016 Nature |
| N497A, R661A) | | |
| AsCpf1 | TTTN (5′ of sgRNA) | Zetsche et al. |
| | | 2015 Cell |

[0385] A “Cpf1” or “Cpf1 protein” or “Cas12a” as referred to herein includes any of the recombinant or naturally-occurring forms of the Cpf1 (CxxC finger protein 1) endonuclease or variants or homologs thereof that maintain Cpf1 endonuclease enzyme activity (e.g. within at least 50%, 80%, 90%, 95%, 96%, 97%, 98%, 99% or 100% activity compared to Cpf1). In some aspects, the variants or homologs have at least 90%, 95%, 96%, 97%, 98%, 99% or 100% amino acid sequence identity across the whole sequence or a portion of the sequence (e.g. a 50, 100, 150 or 200 continuous amino acid portion) compared to a naturally occurring Cpf1 protein. In embodiments, the Cpf1 protein is substantially identical to the protein identified by the UniProt reference number Q9POU4 or a variant or homolog having substantial identity thereto.

[0386] The term “Class II CRISPR endonuclease” refers to endonucleases that have similar endonuclease activity as Cas9 and participate in a Class II CRISPR system. An example Class II CRISPR system is the type II CRISPR locus from Streptococcus pyogenes SF370, which contains a cluster of four genes Cas9, Cas1, Cas2, and Csn1, as well as two non-coding RNA elements, tracrRNA and a characteristic array of repetitive sequences (direct repeats) interspaced by short stretches of non-repetitive sequences (spacers, about 30 bp each). In this system, targeted DNA double-strand break (DSB) may generated in four sequential steps. First, two non-coding RNAs, the pre-crRNA array and tracrRNA, may be transcribed from the CRISPR locus. Second, tracrRNA may hybridize to the direct repeats of pre-crRNA, which is then processed into mature crRNAs containing individual spacer sequences. Third, the mature crRNA:tracrRNA complex may direct Cas9 to the DNA target consisting of the protospacer and the corresponding PAM via heteroduplex formation between the spacer region of the crRNA and the protospacer DNA. Finally, Cas9 may mediate cleavage of target DNA upstream of PAM to create a DSB within the protospacer.

### V. Functional Analysis of Candidate Molecules

[0387] Candidate Cas9 molecules, candidate gRNA molecules, candidate Cas9 molecule/gRNA molecule complexes, can be evaluated by art-known methods or as described herein. For example, exemplary methods for evaluating the endonuclease activity of Cas9 molecule are described, e.g., in Jinek et al., SCIENCE 2012; 337(6096):816-821.

### VI. Template Nucleic Acids (for Introduction of Nucleic Acids)

[0388] The term “template nucleic acid” or “donor template” as used herein refers to a nucleic acid to be inserted at or near a target sequence that has been modified, e.g., cleaved, by a CRISPR system of the present invention. In an embodiment, nucleic acid sequence at or near the target sequence is modified to have some or all of the sequence of the template nucleic acid, typically at or near cleavage site(s). In an embodiment, the template nucleic acid is single stranded. In an alternate embodiment, the template nucleic acid is double stranded. In an embodiment, the template nucleic acid is DNA, e.g., double stranded DNA. In an alternate embodiment, the template nucleic acid is single stranded DNA.

[0389] In embodiments, the template nucleic acid comprises sequence encoding a globin protein, e.g., a beta globin, e.g., comprises a beta globin gene. In an embodiment, the beta globin encoded by the nucleic acid comprises one or more mutations, e.g., anti-sickling mutations. In an embodiment, the beta globin encoded by the nucleic acid comprises the mutation T87Q. In an embodiment, the beta globin encoded by the nucleic acid comprises the mutation G16D. In an embodiment, the beta globin encoded by the nucleic acid comprises the mutation E22A. In an embodiment, the beta globin gene comprises the mutations G16D, E22A and T87Q. In embodiments, the template nucleic acid further comprises one or more regulatory elements, e.g., a promoter (e.g., a human beta globin promoter), a 3′ enhancer, and/or at least a portion of a globin locus control region (e.g., one or more DNAseI hypersensitivity sites (e.g., HS2, HS3 and/or HS4 of the human globin locus)).

[0390] In other embodiments, the template nucleic acid comprises sequence encoding a gamma globin, e.g., comprises a gamma globin gene. In embodiments, the template nucleic acid comprises sequence encoding more than one copy of a gamma globin protein, e.g., comprises two or more, e.g., two, gamma globin gene sequences. In embodiments, the template nucleic acid further comprises one or more regulatory elements, e.g., a promotor and/or enhancer.

[0391] In an embodiment, the template nucleic acid alters the structure of the target position by participating in a homology directed repair event. In an embodiment, the template nucleic acid alters the sequence of the target position. In an embodiment, the template nucleic acid results in the incorporation of a modified, or non-naturally occurring base into the target nucleic acid.

[0392] Mutations in a gene or pathway described herein may be corrected using one of the approaches discussed herein. In an embodiment, a mutation in a gene or pathway described herein is corrected by homology directed repair (HDR) using a template nucleic acid. In an embodiment, a mutation in a gene or pathway described herein is corrected by homologous recombination (HR) using a template nucleic acid. In an embodiment, a mutation in a gene or pathway described herein is corrected by Non-Homologous End Joining (NHEJ) repair using a template nucleic acid. In other embodiments, nucleic acid encoding molecules of interest may be inserted at or near a site modified by a CRISPR system of the present invention. In embodiments, the template nucleic acid comprises regulatory elements, e.g., one or more promotors and/or enhancers, operably linked to the nucleic acid sequence encoding a molecule of interest, e.g., as described herein.

### HDR or HR Repair and Template Nucleic Acids

[0393] As described herein, nuclease-induced homology directed repair (HDR) or homologous recombination (HR) can be used to alter a target sequence and correct (e.g., repair or edit) a mutation in the genome. While not wishing to be bound by theory, it is believed that alteration of the target sequence occurs by repair based on a donor template or template nucleic acid. For example, the donor template or the template nucleic acid provides for alteration of the target sequence. It is contemplated that a plasmid donor or linear double stranded template can be used as a template for homologous recombination. It is further contemplated that a single stranded donor template can be used as a template for alteration of the target sequence by alternate methods of homology directed repair (e.g., single strand annealing) between the target sequence and the donor template. Donor template-effected alteration of a target sequence may depend on cleavage by a Cas9 molecule. Cleavage by Cas9 can comprise a double strand break, one single strand break, or two single strand breaks.

[0394] In an embodiment, a mutation can be corrected by either a single double-strand break or two single strand breaks. In an embodiment, a mutation can be corrected by providing a template and a CRISPR/Cas9 system that creates (1) one double strand break, (2) two single strand breaks, (3) two double stranded breaks with a break occurring on each side of the target sequence, (4) one double stranded break and two single strand breaks with the double strand break and two single strand breaks occurring on each side of the target sequence, (5) four single stranded breaks with a pair of single stranded breaks occurring on each side of the target sequence, or (6) one single strand break.

### Double Strand Break Mediated Correction

[0395] In an embodiment, double strand cleavage is effected by a Cas9 molecule having cleavage activity associated with an HNH-like domain and cleavage activity associated with a RuvC-like domain, e.g., an N-terminal RuvC-like domain, e.g., a wild type Cas9. Such embodiments require only a single gRNA.

### Single Strand Break Mediated Correction

[0396] In other embodiments, two single strand breaks, or nicks, are effected by a Cas9 molecule having nickase activity, e.g., cleavage activity associated with an HNH-like domain or cleavage activity associated with an N-terminal RuvC-like domain. Such embodiments require two gRNAs, one for placement of each single strand break. In an embodiment, the Cas9 molecule having nickase activity cleaves the strand to which the gRNA hybridizes, but not the strand that is complementary to the strand to which the gRNA hybridizes. In an embodiment, the Cas9 molecule having nickase activity does not cleave the strand to which the gRNA hybridizes, but rather cleaves the strand that is complementary to the strand to which the gRNA hybridizes.

[0397] In an embodiment, the nickase has HNH activity, e.g., a Cas9 molecule having the RuvC activity inactivated, e.g., a Cas9 molecule having a mutation at D10, e.g., the D10A mutation. D10A inactivates RuvC; therefore, the Cas9 nickase has (only) HN H activity and will cut on the strand to which the gRNA hybridizes (e.g., the complementary strand, which does not have the NGG PAM on it). In other embodiments, a Cas9 molecule having an H840, e.g., an H840A, mutation can be used as a nickase. H840A inactivates HNH; therefore, the Cas9 nickase has (only) RuvC activity and cuts on the non-complementary strand (e.g., the strand that has the NGG PAM and whose sequence is identical to the gRNA).

[0398] In an embodiment, in which a nickase and two gRNAs are used to position two single strand nicks, one nick is on the + strand and one nick is on the − strand of the target nucleic acid. The PAMs are outwardly facing. The gRNAs can be selected such that the gRNAs are separated by, from about 0-50, 0-100, or 0-200 nucleotides. In an embodiment, there is no overlap between the target sequence that is complementary to the targeting domains of the two gRNAs. In an embodiment, the gRNAs do not overlap and are separated by as much as 50, 100, or 200 nucleotides. In an embodiment, the use of two gRNAs can increase specificity, e.g., by decreasing off-target binding (Ran et al., CELL 2013).

[0399] In an embodiment, a single nick can be used to induce HDR. It is contemplated herein that a single nick can be used to increase the ratio of HDR, HR or NHEJ at a given cleavage site.

### Placement of the Double Strand Break or a Single Strand Break Relative to Target Position

[0400] The double strand break or single strand break in one of the strands should be sufficiently close to target position such that correction occurs. In an embodiment, the distance is not more than 50, 100, 200, 300, 350 or 400 nucleotides. While not wishing to be bound by theory, it is believed that the break should be sufficiently close to target position such that the break is within the region that is subject to exonuclease-mediated removal during end resection. If the distance between the target position and a break is too great, the mutation may not be included in the end resection and, therefore, may not be corrected, as donor sequence may only be used to correct sequence within the end resection region.

[0401] In an embodiment, in which a gRNA (unimolecular (or chimeric) or modular gRNA) and Cas9 nuclease induce a double strand break for the purpose of inducing HDR- or HR-mediated correction, the cleavage site is between 0-200 bp (e.g., 0 to 175, 0 to 150, 0 to 125, 0 to 100, 0 to 75, 0 to 50, 0 to 25, 25 to 200, 25 to 175, 25 to 150, 25 to 125, 25 to 100, 25 to 75, 25 to 50, 50 to 200, 50 to 175, 50 to 150, 50 to 125, 50 to 100, 50 to 75, 75 to 200, 75 to 175, 75 to 150, 75 to 125, 75 to 100 bp) away from the target position. In an embodiment, the cleavage site is between 0-100 bp (e.g., 0 to 75, 0 to 50, 0 to 25, 25 to 100, 25 to 75, 25 to 50, 50 to 100, 50 to 75 or 75 to 100 bp) away from the target position.

[0402] In an embodiment, in which two gRNAs (independently, unimolecular (or chimeric) or modular gRNA) complexing with Cas9 nickases induce two single strand breaks for the purpose of inducing HDR-mediated correction, the closer nick is between 0-200 bp (e.g., 0 to 175, 0 to 150, 0 to 125, 0 to 100, 0 to 75, 0 to 50, 0 to 25, 25 to 200, 25 to 175, 25 to 150, 25 to 125, 25 to 100, 25 to 75, 25 to 50, 50 to 200, 50 to 175, 50 to 150, 50 to 125, 50 to 100, 50 to 75, 75 to 200, 75 to 175, 75 to 150, 75 to 125, 75 to 100 bp) away from the target position and the two nicks will ideally be within 25-55 bp of each other (e.g., 25 to 50, 25 to 45, 25 to 40, 25 to 35, 25 to 30, 30 to 55, 30 to 50, 30 to 45, 30 to 40, 30 to 35, 35 to 55, 35 to 50, 35 to 45, 35 to 40, 40 to 55, 40 to 50, 40 to 45 bp) and no more than 100 bp away from each other (e.g., no more than 90, 80, 70, 60, 50, 40, 30, 20, 10 or 5 bp away from each other). In an embodiment, the cleavage site is between 0-100 bp (e.g., 0 to 75, 0 to 50, 0 to 25, 25 to 100, 25 to 75, 25 to 50, 50 to 100, 50 to 75 or 75 to 100 bp) away from the target position.

[0403] In one embodiment, two gRNAs, e.g., independently, unimolecular (or chimeric) or modular gRNA, are configured to position a double-strand break on both sides of a target position. In an alternate embodiment, three gRNAs, e.g., independently, unimolecular (or chimeric) or modular gRNA, are configured to position a double strand break (i.e., one gRNA complexes with a Cas9 nuclease) and two single strand breaks or paired single stranded breaks (i.e., two gRNAs complex with Cas9 nickases) on either side of the target position (e.g., the first gRNA is used to target upstream (i.e., 5′) of the target position and the second gRNA is used to target downstream (i.e., 3′) of the target position). In another embodiment, four gRNAs, e.g., independently, unimolecular (or chimeric) or modular gRNA, are configured to generate two pairs of single stranded breaks (i.e., two pairs of two gRNAs complex with Cas9 nickases) on either side of the target position (e.g., the first gRNA is used to target upstream (i.e., 5′) of the target position and the second gRNA is used to target downstream (i.e., 3′) of the target position). The double strand break(s) or the closer of the two single strand nicks in a pair will ideally be within 0-500 bp of the target position (e.g., no more than 450, 400, 350, 300, 250, 200, 150, 100, 50 or 25 bp from the target position). When nickases are used, the two nicks in a pair are within 25-55 bp of each other (e.g., between 25 to 50, 25 to 45, 25 to 40, 25 to 35, 25 to 30, 50 to 55, 45 to 55, 40 to 55, 35 to 55, 30 to 55, 30 to 50, 35 to 50, 40 to 50, 45 to 50, 35 to 45, or 40 to 45 bp) and no more than 100 bp away from each other (e.g., no more than 90, 80, 70, 60, 50, 40, 30, 20 or 10 bp).

[0404] In one embodiment, two gRNAs, e.g., independently, unimolecular (or chimeric) or modular gRNA, are configured to position a double-strand break on both sides of a target position. In an alternate embodiment, three gRNAs, e.g., independently, unimolecular (or chimeric) or modular gRNA, are configured to position a double strand break (i.e., one gRNA complexes with a Cas9 nuclease) and two single strand breaks or paired single stranded breaks (i.e., two gRNAs complex with Cas9 nickases) on two target sequences (e.g., the first gRNA is used to target an upstream (i.e., 5′) target sequence and the second gRNA is used to target a downstream (i.e., 3′) target sequence of an insertion site. In another embodiment, four gRNAs, e.g., independently, unimolecular (or chimeric) or modular gRNA, are configured to generate two pairs of single stranded breaks (i.e., two pairs of two gRNAs complex with Cas9 nickases) on either side of an insertion site (e.g., the first gRNA is used to target an upstream (i.e., 5′) target sequence described herein, and the second gRNA is used to target a downstream (i.e., 3′) target sequence described herein). The double strand break(s) or the closer of the two single strand nicks in a pair will ideally be within 0-500 bp of the target position (e.g., no more than 450, 400, 350, 300, 250, 200, 150, 100, 50 or 25 bp from the target position). When nickases are used, the two nicks in a pair are within 25-55 bp of each other (e.g., between 25 to 50, 25 to 45, 25 to 40, 25 to 35, 25 to 30, 50 to 55, 45 to 55, 40 to 55, 35 to 55, 30 to 55, 30 to 50, 35 to 50, 40 to 50, 45 to 50, 35 to 45, or 40 to 45 bp) and no more than 100 bp away from each other (e.g., no more than 90, 80, 70, 60, 50, 40, 30, 20 or 10 bp).

### Length of the Homology Arms

[0405] The homology arm should extend at least as far as the region in which end resection may occur, e.g., in order to allow the resected single stranded overhang to find a complementary region within the donor template. The overall length could be limited by parameters such as plasmid size or viral packaging limits. In an embodiment, a homology arm does not extend into repeated elements, e.g., ALU repeats, LINE repeats. A template may have two homology arms of the same or different lengths.

[0406] Exemplary homology arm lengths include at least 25, 50, 100, 250, 500, 750 or 1000 nucleotides.

[0407] Target position, as used herein, refers to a site on a target nucleic acid (e.g., the chromosome) that is modified by a Cas9 molecule-dependent process. For example, the target position can be a modified Cas9 molecule cleavage of the target nucleic acid and template nucleic acid directed modification, e.g., correction, of the target position. In an embodiment, a target position can be a site between two nucleotides, e.g., adjacent nucleotides, on the target nucleic acid into which one or more nucleotides is added. The target position may comprise one or more nucleotides that are altered, e.g., corrected, by a template nucleic acid. In an embodiment, the target position is within a target sequence (e.g., the sequence to which the gRNA binds). In an embodiment, a target position is upstream or downstream of a target sequence (e.g., the sequence to which the gRNA binds).

[0408] Typically, the template sequence undergoes a breakage mediated or catalyzed recombination with the target sequence. In an embodiment, the template nucleic acid includes sequence that corresponds to a site on the target sequence that is cleaved by a Cas9 mediated cleavage event. In an embodiment, the template nucleic acid includes sequence that corresponds to both, a first site on the target sequence that is cleaved in a first Cas9 mediated event, and a second site on the target sequence that is cleaved in a second Cas9 mediated event.

[0409] In an embodiment, the template nucleic acid can include sequence which results in an alteration in the coding sequence of a translated sequence, e.g., one which results in the substitution of one amino acid for another in a protein product, e.g., transforming a mutant allele into a wild type allele, transforming a wild type allele into a mutant allele, and/or introducing a stop codon, insertion of an amino acid residue, deletion of an amino acid residue, or a nonsense mutation.

[0410] In other embodiments, the template nucleic acid can include sequence which results in an alteration in a non-coding sequence, e.g., an alteration in an exon or in a 5′ or 3′ non-translated or non-transcribed region. Such alterations include an alteration in a control element, e.g., a promoter, enhancer, and an alteration in a cis-acting or trans-acting control element. The template nucleic acid can include sequence which, when integrated, results in:
[0411] decreasing the activity of a positive control element;
[0412] increasing the activity of a positive control element;
[0413] decreasing the activity of a negative control element;
[0414] increasing the activity of a negative control element;
[0415] decreasing the expression of a gene;
[0416] increasing the expression of a gene;
[0417] increasing resistance to a disorder or disease;
[0418] increasing resistance to viral entry;
[0419] correcting a mutation or altering an unwanted amino acid residue;
[0420] conferring, increasing, abolishing or decreasing a biological property of a gene product, e.g., increasing the enzymatic activity of an enzyme, or increasing the ability of a gene product to interact with another molecule.

[0421] The template nucleic acid can include sequence which results in:
[0422] a change in sequence of 1, 2, 3, 4, 5, 6, 7, 8, 9, 10, 11, 12 or more nucleotides of the target sequence.

[0423] In an embodiment, the template nucleic acid is 20+/−10, 30+/−10, 40+/−10, 50+/−10, 60+/−10, 70+/−10, 80+/−10, 90+/−10, 100+/−10, 1 10+/−10, 120+/−10, 130+/−10, 140+/−10, 150+/−10, 160+/−10, 170+/−10, 1 80+/−10, 190+/−10, 200+/−10, 210+/−10, 220+/−10, 200-300, 300-400, 400-500, 500-600, 600-700, 700-800, 800-900, 900-1000, 1000-2000, 2000-3000 or more than 3000 nucleotides in length.

[0424] A template nucleic acid comprises the following components:
[0425] [5′ homology arm]-[insertion sequence]-[3′ homology arm].

[0426] The homology arms provide for recombination into the chromosome, which can replace the undesired element, e.g., a mutation or signature, with the replacement sequence. In an embodiment, the homology arms flank the most distal cleavage sites.

[0427] In an embodiment, the 3′ end of the 5′ homology arm is the position next to the 5′ end of the replacement sequence. In an embodiment, the 5′ homology arm can extend at least 10, 20, 30, 40, 50, 60, 70, 80, 90, 100, 120, 150, 180, 200, 300, 400, 500, 600, 700, 800, 900, 1000, 1500, or 2000 nucleotides 5′ from the 5′ end of the replacement sequence.

[0428] In an embodiment, the 5′ end of the 3′ homology arm is the position next to the 3′ end of the replacement sequence. In an embodiment, the 3′ homology arm can extend at least 10, 20, 30, 40, 50, 60, 70, 80, 90, 100, 120, 150, 180, 200, 300, 400, 500, 600, 700, 800, 900, 1000, 1500, or 2000 nucleotides 3′ from the 3′ end of the replacement sequence.

[0429] It is contemplated herein that one or both homology arms may be shortened to avoid including certain sequence repeat elements, e.g., Alu repeats, LINE elements. For example, a 5′ homology arm may be shortened to avoid a sequence repeat element. In other embodiments, a 3′ homology arm may be shortened to avoid a sequence repeat element. In some embodiments, both the 5′ and the 3′ homology arms may be shortened to avoid including certain sequence repeat elements.

[0430] It is contemplated herein that template nucleic acids for correcting a mutation may designed for use as a single-stranded oligonucleotide (ssODN). When using a ssODN, 5′ and 3′ homology arms may range up to about 200 base pairs (bp) in length, e.g., at least 25, 50, 75, 100, 125, 150, 175, or 200 bp in length. Longer homology arms are also contemplated for ssODNs as improvements in oligonucleotide synthesis continue to be made.

### NHEJ Approaches for Gene Targeting

[0431] As described herein, nuclease-induced non-homologous end-joining (NHEJ) can be used to target gene-specific knockouts. Nuclease-induced NHEJ can also be used to remove (e.g., delete) sequence in a gene of interest.

[0432] While not wishing to be bound by theory, it is believed that, in an embodiment, the genomic alterations associated with the methods described herein rely on nuclease-induced NHEJ and the error-prone nature of the NHEJ repair pathway. NHEJ repairs a double-strand break in the DNA by joining together the two ends; however, generally, the original sequence is restored only if two compatible ends, exactly as they were formed by the double-strand break, are perfectly ligated. The DNA ends of the double-strand break are frequently the subject of enzymatic processing, resulting in the addition or removal of nucleotides, at one or both strands, prior to rejoining of the ends. This results in the presence of insertion and/or deletion (indel) mutations in the DNA sequence at the site of the NHEJ repair. Two-thirds of these mutations may alter the reading frame and, therefore, produce a non-functional protein. Additionally, mutations that maintain the reading frame, but which insert or delete a significant amount of sequence, can destroy functionality of the protein. This is locus dependent as mutations in critical functional domains are likely less tolerable than mutations in non-critical regions of the protein.

[0433] The indel mutations generated by NHEJ are unpredictable in nature; however, at a given break site certain indel sequences are favored and are overrepresented in the population. The lengths of deletions can vary widely; most commonly in the 1-50 bp range, but they can easily reach greater than 100-200 bp. Insertions tend to be shorter and often include short duplications of the sequence immediately surrounding the break site. However, it is possible to obtain large insertions, and in these cases, the inserted sequence has often been traced to other regions of the genome or to plasmid DNA present in the cells.

[0434] Because NHEJ is a mutagenic process, it can also be used to delete small sequence motifs as long as the generation of a specific final sequence is not required. If a double-strand break is targeted near to a short target sequence, the deletion mutations caused by the NHEJ repair often span, and therefore remove, the unwanted nucleotides. For the deletion of larger DNA segments, introducing two double-strand breaks, one on each side of the sequence, can result in NHEJ between the ends with removal of the entire intervening sequence. Both of these approaches can be used to delete specific DNA sequences; however, the error-prone nature of NHEJ may still produce indel mutations at the site of repair.

[0435] Both double strand cleaving Cas9 molecules and single strand, or nickase, Cas9 molecules can be used in the methods and compositions described herein to generate NHEJ-mediated indels. NHEJ-mediated indels targeted to the gene, e.g., a coding region, e.g., an early coding region of a gene of interest can be used to knockout (i.e., eliminate expression of) a gene of interest. For example, early coding region of a gene of interest includes sequence immediately following a transcription start site, within a first exon of the coding sequence, or within 500 bp of the transcription start site (e.g., less than 500, 450, 400, 350, 300, 250, 200, 150, 100 or 50 bp).

### Placement of Double Strand or Single Strand Breaks Relative to the Target Position

[0436] In an embodiment, in which a gRNA and Cas9 nuclease generate a double strand break for the purpose of inducing NHEJ-mediated indels, a gRNA, e.g., a unimolecular (or chimeric) or modular gRNA molecule, is configured to position one double-strand break in close proximity to a nucleotide of the target position. In an embodiment, the cleavage site is between 0-500 bp away from the target position (e.g., less than 500, 400, 300, 200, 100, 50, 40, 30, 25, 20, 15, 10, 9, 8, 7, 6, 5, 4, 3, 2 or 1 bp from the target position).

[0437] In an embodiment, in which two gRNAs complexing with Cas9 nickases induce two single strand breaks for the purpose of inducing NHEJ-mediated indels, two gRNAs, e.g., independently, unimolecular (or chimeric) or modular gRNA, are configured to position two single-strand breaks to provide for NHEJ repair a nucleotide of the target position. In an embodiment, the gRNAs are configured to position cuts at the same position, or within a few nucleotides of one another, on different strands, essentially mimicking a double strand break. In an embodiment, the closer nick is between 0-30 bp away from the target position (e.g., less than 30, 25, 20, 1, 10, 9, 8, 7, 6, 5, 4, 3, 2 or 1 bp from the target position), and the two nicks are within 25-55 bp of each other (e.g., between 25 to 50, 25 to 45, 25 to 40, 25 to 35, 25 to 30, 50 to 55, 45 to 55, 40 to 55, 35 to 55, 30 to 55, 30 to 50, 35 to 50, 40 to 50, 45 to 50, 35 to 45, or 40 to 45 bp) and no more than 100 bp away from each other (e.g., no more than 90, 80, 70, 60, 50, 40, 30, 20 or 10 bp). In an embodiment, the gRNAs are configured to place a single strand break on either side of a nucleotide of the target position.

[0438] Both double strand cleaving Cas9 molecules and single strand, or nickase, Cas9 molecules can be used in the methods and compositions described herein to generate breaks both sides of a target position. Double strand or paired single strand breaks may be generated on both sides of a target position to remove the nucleic acid sequence between the two cuts (e.g., the region between the two breaks is deleted). In one embodiment, two gRNAs, e.g., independently, unimolecular (or chimeric) or modular gRNA, are configured to position a double-strand break on both sides of a target position (e.g., the first gRNA is used to target upstream (i.e., 5′) of the mutation in a gene or pathway described herein, and the second gRNA is used to target downstream (i.e., 3′) of the mutation in a gene or pathway described herein). In an alternate embodiment, three gRNAs, e.g., independently, unimolecular (or chimeric) or modular gRNA, are configured to position a double strand break (i.e., one gRNA complexes with a Cas9 nuclease) and two single strand breaks or paired single stranded breaks (i.e., two gRNAs complex with Cas9 nickases) on either side of a target position (e.g., the fu st gRNA is used to target upstream (i.e., 5′) of the mutation in a gene or pathway described herein, and the second gRNA is used to target downstream (i.e., 3′) of the mutation in a gene or pathway described herein). In another embodiment, four gRNAs, e.g., independently, unimolecular (or chimeric) or modular gRNA, are configured to generate two pairs of single stranded breaks (i.e., two pairs of two gRNAs complex with Cas9 nickases) on either side of the target position (e.g., the first gRNA is used to target upstream (i.e., 5′) of the mutation in a gene or pathway described herein, and the second gRNA is used to target downstream (i.e., 3′) of the mutation in a gene or pathway described herein). The double strand break(s) or the closer of the two single strand nicks in a pair will ideally be within 0-500 bp of the target position (e.g., no more than 450, 400, 350, 300, 250, 200, 150, 100, 50 or 25 bp from the target position). When nickases are used, the two nicks in a pair are within 25-55 bp of each other (e.g., between 25 to 50, 25 to 45, 25 to 40, 25 to 35, 25 to 30, 50 to 55, 45 to 55, 40 to 55, 35 to 55, 30 to 55, 30 to 50, 35 to 50, 40 to 50, 45 to 50, 35 to 45, or 40 to 45 bp) and no more than 100 bp away from each other (e.g., no more than 90, 80, 70, 60, 50, 40, 30, 20 or 10 bp).

[0439] In other embodiments, the insertion of template nucleic acid may be mediated by microhomology end joining (MMEJ). See, e.g., Saksuma et al., “MMEJ-assisted gene knock-in using TALENs and CRISPR-Cas9 with the PITCh systems.” Nature Protocols 11, 118-133 (2016) doi:10.1038/nprot.2015.140 Published online 17 Dec. 2015, the contents of which are incorporated by reference in their entirety.

### VII. Systems Comprising More than One gRNA Molecule

[0440] While not intending to be bound by theory, it has been surprisingly shown herein that the targeting of two target sequences (e.g., by two gRNA molecule/Cas9 molecule complexes which each induce a single- or double-strand break at or near their respective target sequences) located in close proximity on a continuous nucleic acid induces excision (e.g., deletion) of the nucleic acid sequence (or at least 80%, 85%, 90%, 95%, 96%, 97%, 98%, 99% of the nucleic acid sequence) located between the two target sequences. In some aspects, the present disclosure provides for the use of two or more gRNA molecules that comprise targeting domains targeting target sequences in close proximity on a continuous nucleic acid, e.g., a chromosome, e.g., a gene or gene locus, including its introns, exons and regulatory elements. The use may be, for example, by introduction of the two or more gRNA molecules, together with one or more Cas9 molecules (or nucleic acid encoding the two or more gRNA molecules and/or the one or more Cas9 molecules) into a cell.

[0441] In some aspects, the target sequences of the two or more gRNA molecules are located at least 5, 6, 7, 8, 9, 10, 20, 30, 40, 50, 60, 70, 80, 90, 100, 200, 300, 400, 500, 600, 700, 800, 900, 1000, 2000, 3000, 4000, 5000, 6000, 7000, 8000, 9000, 10,000, 11,000, 12,000, 13,000, 14,000, or 15,000 nucleotides apart on a continuous nucleic acid, but not more than 25,000 nucleotides apart on a continuous nucleic acid. In embodiments, the target sequences are located between about 4000 and about 6000 nucleotides apart. In an embodiment, the target sequences are located about 4000 nucleotides apart. In an embodiment, the target sequences are located about 5000 nucleotides apart. In an embodiment, the target sequences are located about 6000 nucleotides apart.

[0442] In some aspects, the plurality of gRNA molecules each target sequences within the same gene or gene locus. In another aspect, the plurality of gRNA molecules each target sequences within 2 or more different genes or gene loci.

[0443] In some aspects, the invention provides compositions and cells comprising a plurality, for example, 2 or more, for example, 2, gRNA molecules of the invention, wherein the plurality of gRNA molecules target sequences less than 15,000, less than 14,000, less than 13,000, less than 12,000, less than 11,000, less than 10,000, less than 9,000, less than 8,000, less than 7,000, less than 6,000, less than 5,000, less than 4,000, less than 3,000, less than 2,000, less than 1,000, less than 900, less than 800, less than 700, less than 600, less than 500, less than 400, less than 300, less than 200, less than 100, less than 90, less than 80, less than 70, less than 60, less than 50, less than 40, or less than 30 nucleotides apart. In an embodiment, the target sequences are on the same strand of duplex nucleic acid. In an embodiment, the target sequences are on different strands of duplex nucleic acid.

[0444] In one embodiment, the invention provides a method for excising (e.g., deleting) nucleic acid disposed between two gRNA binding sites disposed less than 25,000, less than 20,000, less than 15,000, less than 14,000, less than 13,000, less than 12,000, less than 11,000, less than 10,000, less than 9,000, less than 8,000, less than 7,000, less than 6,000, less than 5,000, less than 4,000, less than 3,000, less than 2,000, less than 1,000, less than 900, less than 800, less than 700, less than 600, less than 500, less than 400, less than 300, less than 200, less than 100, less than 90, less than 80, less than 70, less than 60, less than 50, less than 40, or less than 30 nucleotides apart on the same or different strands of duplex nucleic acid. In an embodiment, the method provides for deletion of more than 50%, more than 60%, more than 70%, more than 80%, more than 85%, more than 86%, more than 87%, more than 88%, more than 89%, more than 90%, more than 91%, more than 92%, more than 93%, more than 94%, more than 95%, more than 96%, more than 97%, more than 98%, more than 99%, or 100% of the nucleotides disposed between the PAM sites associated with each gRNA binding site. In embodiments, the deletion further comprises of one or more nucleotides within one or more of the PAM sites associated with each gRNA binding site. In embodiments, the deletion also comprises one or more nucleotides outside of the region between the PAM sites associated with each gRNA binding site.

[0445] In one aspect, the two or more gRNA molecules comprise targeting domains targeting target sequences flanking a gene regulatory element, e.g., a promotor binding site, an enhancer region, or a repressor region, such that excision of the intervening sequence (or a portion of the intervening sequence) causes up- or down-regulation of a gene of interest. In other embodiments, the two or more gRNA molecules comprise targeting domains that target sequences flanking a gene, such that excision of the intervening sequence (or portion thereof) causes deletion of the gene of interest.

[0446] In an embodiment, the two or more gRNA molecules each include a targeting domain comprising, e.g., consisting of, atargeting domain sequence of Table 1, e.g., of Table 2 or, e.g., of Table 3. In embodiments, the two or more gRNA molecules each include a targeting domain comprising, e.g., consisting of, the targeting domain of a gRNA molecule which results in at least 15% upregulation in the number of F cells in a population of red blood cells differentiated (e.g., at day 7 following editing) from HSPCs edited by said gRNA ex vivo by the methods described herein. In aspects, the two or more gRNA molecules comprise targeting domains that are complementary with sequences in the same gene or region, e.g., the ZNF644 gene region. In aspects, the two or more gRNA molecules comprise targeting domains that are complementary with sequences of different genes or regions, for example one in the ZNF644 intron region and one in the ZNF644 exon region.

[0447] In one aspect, the two or more gRNA molecules comprise targeting domains targeting target sequences flanking a gene regulatory element, e.g., a promotor binding site, an enhancer region, or a repressor region, such that excision of the intervening sequence (or a portion of the intervening sequence) causes up- or down-regulation of a gene of interest. In another aspect, the two or more gRNA molecules comprise targeting domains targeting target sequences flanking a gene, such that excision of the intervening sequence (or a portion of the intervening sequence) causes deletion of the gene of interest. By way of example, the two or more gRNA molecules comprise targeting domains targeting target sequences flanking the ZNF644 gene, such that the ZNF644 gene is excised.

[0448] In an embodiment, the two or more gRNA molecules comprise targeting domains that comprise, e.g., consist of, targeting domains selected from Table 1.

[0449] In aspects, the two or more gRNA molecules comprise targeting domains comprising, e.g., consisting of, targeting domain sequences listed in Table 2. In aspects, the two or more gRNA molecules comprise targeting domains comprising, e.g., consisting of, targeting domain sequences of gRNAs listed in Table 3.

### VIII. Properties of the gRNA

[0450] It has further been surprisingly shown herein that single gRNA molecules may have target sequences in more than one loci (for example, loci with high sequence homology), and that, when such loci are present on the same chromosome, for example, within less than about 15,000 nucleotides, less than about 14,000 nucleotides, less than about 13,000 nucleotides, less than about 12,000 nucleotides, less than about 11,000 nucleotides, less than about 10,000 nucleotides, less than about 9,000 nucleotides, less than about 8,000 nucleotides, less than about 7,000 nucleotides, less than about 6,000 nucleotides, less than about 5,000 nucleotides, less than about 4,000 nucleotides, or less than about 3,000 nucleotides, (e.g., from about 4,000 to about 6,000 nucleotides apart) such a gRNA molecule may result in excision of the intervening sequence (or portion thereof), thereby resulting in a beneficial effect, for example, upregulation of fetal hemoglobin in erythroid cells differentiated from modified HSPCs (as described herein). Thus, in an aspect, the invention provides gRNA molecules which have target sequences at two loci, for example, to loci on the same chromosome, for example, which have target sequences at a ZNF644 intron region and at ZNF644 exon region (for example as described in Tables 1-3). Without begin bound by theory, it is believed that such gRNAs may result in the cutting of the genome at more than one location (e.g., at the target sequence in each of two regions), and that subsequent repair may result in a deletion of the intervening nucleic acid sequence. Again, without being bound by theory, deletion of said intervening sequence may have a desired effect on the expression or function of one or more proteins.

[0451] Without being bound by theory, it is believed that some indel patterns may be more advantageous than others. For example, indels which predominantly include insertions and/or deletions which result in a “frameshift mutation” (e.g., 1- or 2-base pair insertion or deletions, or any insertion or deletion where n/3 is not a whole number (where n=the number of nucleotides in the insertion or deletion)) may be beneficial in reducing or eliminating expression of a functional protein. Likewise, indels which predominantly include “large deletions” (deletions of more than 10, 11, 12, 13, 14, 15, 20, 25, or 30 nucleotides, for example, more than 1 kb, more than 2 kb, more than 3 kb, more than 5 kb or more than 10 kb, for example, comprising sequence disposed between a first and second binding site for a gRNA, e.g., as described herein) may also be beneficial in, for example, removing critical regulatory sequences such as promoter binding sites, or altering the structure or function of a locus, which may similarly have an effect on expression of functional protein. While the indel patterns induced by a given gRNA/CRISPR system have surprisingly been found to be consistently reproduced for a given cell type, gRNA and CRISPR system, as described herein, not any single indel structure will inevitably be produced in a given cell upon introduction of a gRNA/CRISPR system.

[0452] The invention thus provides for gRNA molecules which create a beneficial indel pattern or structure, for example, which have indel patterns or structures predominantly composed of large deletions. Such gRNA molecules may be selected by assessing the indel pattern or structure created by a candidate gRNA molecule in a test cell (for example, a HEK293 cell) or in the cell of interest, e.g., a HSPC cell by NGS, as described herein. As shown in the Examples, gRNA molecules have been discovered, which, when introduced into the desired cell population, result in a population of cells comprising a significant fraction of the cells having a large deletion at or near the target sequence of the gRNA. In some cases, the rate of large deletion indel formation is as high as 75%, 80%, 85%, 90% or more. The invention thus provides for populations of cells which comprise at least about 40% of cells (e.g., at least about 45%, at least about 50%, at least about 55%, at least about 60%, at least about 65%, at least about 70%, at least about 75%, at least about 80%, at least about 85%, at least about 90%, at least about 95%, or at least about 99%) having a large deletion, e.g., as described herein, at or near the target site of a gRNA molecule described herein. The invention also provides for populations of cells which comprise at least about 50% of cells (e.g., at least about 55%, at least about 60%, at least about 65%, at least about 70%, at least about 75%, at least about 80%, at least about 85%, at least about 90%, at least about 95%, or at least about 99%) having a large deletion, e.g., as described herein, at or near the target site of a gRNA molecule described herein.

[0453] The invention thus provides methods of selecting gRNA molecules for use in the therapeutic methods of the invention comprising: 1) providing a plurality of gRNA molecules to a target of interest, 2) assessing the indel pattern or structure created by use of said gRNA molecules, 3) selecting a gRNA molecule that forms an indel pattern or structure composed predominantly of frameshift mutations, large deletions or a combination thereof, and 4) using said selected gRNA in a methods of the invention.

[0454] The invention thus provides methods of selecting gRNA molecules for use in the therapeutic methods of the invention comprising: 1) providing a plurality of gRNA molecules to a target of interest, e.g., which have target sequences at more than one location 2) assessing the indel pattern or structure created by use of said gRNA molecules, 3) selecting a gRNA molecule that forms an excision of sequence comprising nucleic acid sequence located between the two target sequences, e.g., in at least about 25% or more of the cells of a population of cells which are exposed to said gRNA molecules, and 4) using said selected gRNA molecule in a methods of the invention.

[0455] The invention further provides methods of altering cells, and altered cells, wherein a particular indel pattern is constantly produced with a given gRNA/CRISPR system in that cell type. The indel patterns, including the top 5 most frequently occurring indels observed with the gRNA/CRISPR systems described herein can be determined using the methods of the examples, and are disclosed, for example, in the Examples. As shown in the Examples, populations of cells are generated, wherein a significant fraction of the cells comprises one of the top 5 indels (for example, populations of cells wherein one of the top 5 indels is present in more than 30%, more than 40%, more than 50%, more than 60% or more of the cells of the population. Thus, the invention provides cells, e.g., HSPCs (as described herein), which comprise an indel of any one of the top 5 indels observed with a given gRNA/CRISPR system. Further, the invention provides populations of cells, e.g., HSPCs (as described herein), which when assessed by, for example, NGS, comprise a high percentage of cells comprising one of the top 5 indels described herein for a given gRNA/CRISPR system. When used in connection with indel pattern analysis, a “high percentage” refers to at least about 50% (e.g., at least about 55%, at least about 60%, at least about 65%, at least about 70%, at least about 75%, at least about 80%, at least about 85%, at least about 90%, at least about 95%, or at least about 99%) of the cells of the population comprising one of the top 5 indels described herein for a given gRNA/CRISPR system. In other embodiments, the population of cells comprises at least about 25% (e.g., from about 25% to about 60%, e.g., from about 25% to about 50%, e.g., from about 25% to about 40%, e.g., from about 25% to about 35%) of cells which have one of the top 5 indels described herein for a given gRNA/CRISPR system.

[0456] It has also been discovered that certain gRNA molecules do not create indels at off-target sequences (e.g., off-target sequences outside of the ZNF644 gene region) within the genome of the target cell type, or produce indels at off target sites (e.g., off-target sequences outside of the ZNF644 region) at very low frequencies (e.g., <5% of cells within a population) relative to the frequency of indel creation at the target site. Thus, the invention provides for gRNA molecules and CRISPR systems which do not exhibit off-target indel formation in the target cell type, or which produce a frequency of off-target indel formation of less than 5%, for example, an indel at any off-target site outside of the ZNF644 gene region at a frequency of less than 5%. In embodiments, the invention provides gRNA molecules and CRISPR systems which do not exhibit any off target indel formation in the target cell type. Thus, the invention further provides a cell, e.g., a population of cells, e.g., HSPCs, e.g., as described herein, which comprise an indel at or near a target site of a gRNA molecule described herein (e.g., a frameshift indel, or any one of the top 5 indels produced by a given gRNA/CRISPR system, e.g., as described herein), but does not comprise an indel at any off-target site of the gRNA molecule, for example, an indel at any off-target site outside of the ZNF644 gene region. In other embodiments, the invention further provides a population of cells, e.g., HSPCs, e.g., as described herein, which comprises at least 20%, for example at least 30%, for example at least 40%, for example at least 50%, for example at least 60%, for example at least 70%, for example at least 75% of cells which have an indel at or near a target site of a gRNA molecule described herein (e.g., a frameshift indel, or any one of the top 5 indels produced by a given gRNA/CRISPR system, e.g., as described herein), but which comprises less than 5%, e.g., less than 4%, less than 3%, less than 2% or less than 1%, of cells comprising an indel at any off-target site of the gRNA molecule, for example, an indel at any off-target site outside of the ZNF644 gene region. In other embodiments, the invention further provides a population of cells, e.g., HSPCs, e.g., as described herein, which comprises at least 20%, for example at least 30%, for example at least 40%, for example at least 50%, for example at least 60%, for example at least 70%, for example at least 75%, for example at least 80%, for example at least 90%, for example at least 95%, of cells which have an indel within the ZNF644 gene region (e.g., at or near a sequence which is as least 90% homologous to the target sequence of the gRNA), but which comprises less than 5%, e.g., less than 4%, less than 3%, less than 2% or less than 1%, of cells comprising an indel at or near any off-target site outside of the ZNF644 gene region. In embodiments, the off-target indel is formed within a sequence of a gene, e.g., within a coding sequence of a gene. In embodiments no off-target indel is formed within a sequence of a gene, e.g., within a coding sequence of a gene, in the cell of interest, e.g., as described herein.

### IX. Delivery/Constructs

[0457] The components, e.g., a Cas9 molecule or gRNA molecule, or both, can be delivered, formulated, or administered in a variety of forms. As a non-limiting example, the gRNA molecule and Cas9 molecule can be formulated (in one or more compositions), directly delivered or administered to a cell in which a genome editing event is desired. Alternatively, nucleic acid encoding one or more components, e.g., a Cas9 molecule or gRNA molecule, or both, can be formulated (in one or more compositions), delivered or administered. In one aspect, the gRNA molecule is provided as DNA encoding the gRNA molecule and the Cas9 molecule is provided as DNA encoding the Cas9 molecule. In one embodiment, the gRNA molecule and Cas9 molecule are encoded on separate nucleic acid molecules. In one embodiment, the gRNA molecule and Cas9 molecule are encoded on the same nucleic acid molecule. In one aspect, the gRNA molecule is provided as RNA and the Cas9 molecule is provided as DNA encoding the Cas9 molecule. In one embodiment, the gRNA molecule is provided with one or more modifications, e.g., as described herein. In one aspect, the gRNA molecule is provided as RNA and the Cas9 molecule is provided as mRNA encoding the Cas9 molecule. In one aspect, the gRNA molecule is provided as RNA and the Cas9 molecule is provided as a protein. In one embodiment, the gRNA and Cas9 molecule are provided as a ribonuclear protein complex (RNP). In one aspect, the gRNA molecule is provided as DNA encoding the gRNA molecule and the Cas9 molecule is provided as a protein.

[0458] Delivery, e.g., delivery of the RNP, (e.g., to HSPC cells as described herein) may be accomplished by, for example, electroporation (e.g., as known in the art) or other method that renders the cell membrane permeable to nucleic acid and/or polypeptide molecules. In embodiments, the CRISPR system, e.g., the RNP as described herein, is delivered by electroporation using a 4D-Nucleofector (Lonza), for example, using program CM-137 on the 4D-Nucleofector (Lonza). In embodiments, the CRISPR system, e.g., the RNP as described herein, is delivered by electroporation using a voltage from about 800 volts to about 2000 volts, e.g., from about 1000 volts to about 1800 volts, e.g., from about 1200 volts to about 1800 volts, e.g., from about 1400 volts to about 1800 volts, e.g., from about 1600 volts to about 1800 volts, e.g., about 1700 volts, e.g., at a voltage of 1700 volts. In embodiments, the pulse width/length is from about 10 ms to about 50 ms, e.g., from about 10 ms to about 40 ms, e.g., from about 10 ms to about 30 ms, e.g., from about 15 ms to about 25 ms, e.g., about 20 ms, e.g., 20 ms. In embodiments, 1, 2, 3, 4, 5, or more, e.g., 2, e.g., 1 pulses are used. In an embodiment, the CRISPR system, e.g., the RNP as described herein, is delivered by electroporation using a voltage of about 1700 volts (e.g., 1700 volts), a pulse width of about 20 ms (e.g., 20 ms), using a single (1) pulse. In embodiments, electroporation is accomplished using a Neon electroporator. Additional techniques for rendering the membrane permeable are known in the art and include, for example, cell squeezing (e.g., as described in WO2015/023982 and WO2013/059343, the contents of which are hereby incorporated by reference in their entirety), nanoneedles (e.g., as described in Chiappini et al., Nat. Mat., 14; 532-39, or US2014/0295558, the contents of which are hereby incorporated by reference in their entirety) and nanostraws (e.g., as described in Xie, ACS Nano, 7(5); 4351-58, the contents of which are hereby incorporated by reference in their entirety).

[0459] When a component is delivered encoded in DNA the DNA will typically include a control region, e.g., comprising a promoter, to effect expression. Useful promoters for Cas9 molecule sequences include CMV, EF-1alpha, MSCV, PGK, CAG control promoters. Useful promoters for gRNAs include H1, EF-1a and U6 promoters. Promoters with similar or dissimilar strengths can be selected to tune the expression of components. Sequences encoding a Cas9 molecule can comprise a nuclear localization signal (NLS), e.g., an SV40 NLS. In an embodiment, a promoter for a Cas9 molecule or a gRNA molecule can be, independently, inducible, tissue specific, or cell specific.

DNA-Based Delivery of a Cas9 Molecule and or a gRNA Molecule

[0460] DNA encoding Cas9 molecules and/or gRNA molecules, can be administered to subjects or delivered into cells by art-known methods or as described herein. For example, Cas9-encoding and/or gRNA-encoding DNA can be delivered, e.g., by vectors (e.g., viral or non-viral vectors), non-vector based methods (e.g., using naked DNA or DNA complexes), or a combination thereof.

[0461] In some embodiments, the Cas9- and/or gRNA-encoding DNA is delivered by a vector (e.g., viral vector/virus, plasmid, minicircle or nanoplasmid).

[0462] A vector can comprise a sequence that encodes a Cas9 molecule and/or a gRNA molecule. A vector can also comprise a sequence encoding a signal peptide (e.g., for nuclear localization, nucleolar localization, mitochondrial localization), fused, e.g., to a Cas9 molecule sequence. For example, a vector can comprise one or more nuclear localization sequence (e.g., from SV40) fused to the sequence encoding the Cas9 molecule.

[0463] One or more regulatory/control elements, e.g., a promoter, an enhancer, an intron, a polyadenylation signal, a Kozak consensus sequence, internal ribosome entry sites (IRES), a 2A sequence, and a splice acceptor or donor can be included in the vectors. In some embodiments, the promoter is recognized by RNA polymerase II (e.g., a CMV promoter). In other embodiments, the promoter is recognized by RNA polymerase III (e.g., a U6 promoter). In some embodiments, the promoter is a regulated promoter (e.g., inducible promoter). In other embodiments, the promoter is a constitutive promoter. In some embodiments, the promoter is a tissue specific promoter. In some embodiments, the promoter is a viral promoter. In other embodiments, the promoter is a non-viral promoter.

[0464] In some embodiments, the vector or delivery vehicle is a minicircle. In some embodiments, the vector or delivery vehicle is a nanoplasmid.

[0465] In some embodiments, the vector or delivery vehicle is a viral vector (e.g., for generation of recombinant viruses). In some embodiments, the virus is a DNA virus (e.g., dsDNA or ssDNA virus). In other embodiments, the virus is an RNA virus (e.g., an ssRNA virus).

[0466] Exemplary viral vectors/viruses include, e.g., retroviruses, lentiviruses, adenovirus, adeno-associated virus (AAV), vaccinia viruses, poxviruses, and herpes simplex viruses. Viral vector technology is well known in the art and is described, for example, in Sambrook et al., 2012, MOLECULAR CLONING: A LABORATORY MANUAL, volumes 1-4, Cold Spring Harbor Press, NY), and in other virology and molecular biology manuals.

[0467] In some embodiments, the virus infects dividing cells. In other embodiments, the virus infects non-dividing cells. In some embodiments, the virus infects both dividing and non-dividing cells. In some embodiments, the virus can integrate into the host genome. In some embodiments, the virus is engineered to have reduced immunity, e.g., in human. In some embodiments, the virus is replication-competent. In other embodiments, the virus is replication-defective, e.g., having one or more coding regions for the genes necessary for additional rounds of virion replication and/or packaging replaced with other genes or deleted. In some embodiments, the virus causes transient expression of the Cas9 molecule and/or the gRNA molecule. In other embodiments, the virus causes long-lasting, e.g., at least 1 week, 2 weeks, 1 month, 2 months, 3 months, 6 months, 9 months, 1 year, 2 years, or permanent expression, of the Cas9 molecule and/or the gRNA molecule. The packaging capacity of the viruses may vary, e.g., from at least about 4 kb to at least about 30 kb, e.g., at least about 5 kb, 10 kb, 15 kb, 20 kb, 25 kb, 30 kb, 35 kb, 40 kb, 45 kb, or 50 kb.

[0468] In some embodiments, the Cas9- and/or gRNA-encoding DNA is delivered by a recombinant retrovirus. In some embodiments, the retrovirus (e.g., Moloney murine leukemia vims) comprises a reverse transcriptase, e.g., that allows integration into the host genome. In some embodiments, the retrovirus is replication-competent. In other embodiments, the retrovirus is replication-defective, e.g., having one of more coding regions for the genes necessary for additional rounds of virion replication and packaging replaced with other genes, or deleted.

[0469] In some embodiments, the Cas9- and/or gRNA-encoding DNA is delivered by a recombinant lentivirus. For example, the lentivirus is replication-defective, e.g., does not comprise one or more genes required for viral replication.

[0470] In some embodiments, the Cas9- and/or gRNA-encoding DNA is delivered by a recombinant adenovirus. In some embodiments, the adenovirus is engineered to have reduced immunity in human.

[0471] In some embodiments, the Cas9- and/or gRNA-encoding DNA is delivered by a recombinant AAV. In some embodiments, the AAV can incorporate its genome into that of a host cell, e.g., a target cell as described herein. In some embodiments, the AAV is a self-complementary adeno-associated virus (scAAV), e.g., a scAAV that packages both strands which anneal together to form double stranded DNA. AAV serotypes that may be used in the disclosed methods include, e.g., AAV1, AAV2, modified AAV2 (e.g., modifications at Y444F, Y500F, Y730F and/or S662V), AAV3, modified AAV3 (e.g., modifications at Y705F, Y73 1 F and/or. T492V), AAV4, AAV5, AAV6, modified AAV6 (e.g., modifications at S663V and/or T492V), AAV8. AAV8.2, AAV9, AAV rh 10, and pseudotyped AAV, such as AAV2/8, AAV2/5 and AAV2/6 can also be used in the disclosed methods.

[0472] In some embodiments, the Cas9- and/or gRNA-encoding DNA is delivered by a hybrid virus, e.g., a hybrid of one or more of the viruses described herein.

[0473] A Packaging cell is used to form a virus particle that is capable of infecting a host or target cell. Such a cell includes a 293 cell, which can package adenovirus, and a W² cell or a PA317 cell, which can package retrovirus. A viral vector used in gene therapy is usually generated by a producer cell line that packages a nucleic acid vector into a viral particle. The vector typically contains the minimal viral sequences required for packaging and subsequent integration into a host or target cell (if applicable), with other viral sequences being replaced by an expression cassette encoding the protein to be expressed. For example, an AAV vector used in gene therapy typically only possesses inverted terminal repeat (ITR) sequences from the AAV genome which are required for packaging and gene expression in the host or target cell. The missing viral functions are supplied in trans by the packaging cell line. Henceforth, the viral DNA is packaged in a cell line, which contains a helper plasmid encoding the other AAV genes, namely rep and cap, but lacking ITR sequences. The cell line is also infected with adenovirus as a helper. The helper virus promotes replication of the AAV vector and expression of AAV genes from the helper plasmid. The helper plasmid is not packaged in significant amounts due to a lack of ITR sequences. Contamination with adenovirus can be reduced by, e.g., heat treatment to which adenovirus is more sensitive than AAV.

[0474] In an embodiment, the viral vector has the ability of cell type and/or tissue type recognition. For example, the viral vector can be pseudotyped with a different/alternative viral envelope glycoprotein; engineered with a cell type-specific receptor (e.g., genetic modification of the viral envelope glycoproteins to incorporate targeting ligands such as a peptide ligand, a single chain antibody, a growth factor); and/or engineered to have a molecular bridge with dual specificities with one end recognizing a viral glycoprotein and the other end recognizing a moiety of the target cell surface (e.g., ligand-receptor, monoclonal antibody, avidin-biotin and chemical conjugation).

[0475] In an embodiment, the viral vector achieves cell type specific expression. For example, a tissue-specific promoter can be constructed to restrict expression of the transgene (Cas 9 and gRNA) in only the target cell. The specificity of the vector can also be mediated by microRNA-dependent control of transgene expression. In an embodiment, the viral vector has increased efficiency of fusion of the viral vector and a target cell membrane. For example, a fusion protein such as fusion-competent hemagglutinin (HA) can be incorporated to increase viral uptake into cells. In an embodiment, the viral vector has the ability of nuclear localization. For example, a virus that requires the breakdown of the cell wall (during cell division) and therefore will not infect a non-diving cell can be altered to incorporate a nuclear localization peptide in the matrix protein of the virus thereby enabling the transduction of non-proliferating cells.

[0476] In some embodiments, the Cas9- and/or gRNA-encoding DNA is delivered by a non-vector based method (e.g., using naked DNA or DNA complexes). For example, the DNA can be delivered, e.g., by organically modified silica or silicate (Ormosil), electroporation, gene gun, sonoporation, magnetofection, lipid-mediated transfection, dendrimers, inorganic nanoparticles, calcium phosphates, or a combination thereof.

[0477] In some embodiments, the Cas9- and/or gRNA-encoding DNA is delivered by a combination of a vector and a non-vector based method. For example, a virosome comprises a liposome combined with an inactivated virus (e.g., HIV or influenza virus), which can result in more efficient gene transfer, e.g., in a respiratory epithelial cell than either a viral or a liposomal method alone.

[0478] In an embodiment, the delivery vehicle is a non-viral vector. In an embodiment, the non-viral vector is an inorganic nanoparticle (e.g., attached to the payload to the surface of the nanoparticle). Exemplary inorganic nanoparticles include, e.g., magnetic nanoparticles (e.g., Fe lvlnO₂), or silica. The outer surface of the nanoparticle can be conjugated with a positively charged polymer (e.g., polyethylenimine, polylysine, polyserine) which allows for attachment (e.g., conjugation or entrapment) of payload. In an embodiment, the non-viral vector is an organic nanoparticle (e.g., entrapment of the payload inside the nanoparticle). Exemplary organic nanoparticles include, e.g., SNALP liposomes that contain cationic lipids together with neutral helper lipids which are coated with polyethylene glycol (PEG) and protamine and nucleic acid complex coated with lipid coating.

[0479] Exemplary lipids and/or polymers for transfer of CRISPR systems or nucleic acid, e.g., vectors, encoding CRISPR systems or components thereof include, for example, those described in WO2011/076807, WO2014/136086, WO2005/060697, WO2014/140211, WO2012/031046, WO2013/103467, WO2013/006825, WO2012/006378, WO2015/095340, and WO2015/095346, the contents of each of the foregoing are hereby incorporated by reference in their entirety. In an embodiment, the vehicle has targeting modifications to increase target cell update of nanoparticles and liposomes, e.g., cell specific antigens, monoclonal antibodies, single chain antibodies, aptamers, polymers, sugars, and cell penetrating peptides. In an embodiment, the vehicle uses fusogenic and endosome-destabilizing peptides/polymers. In an embodiment, the vehicle undergoes acid-triggered conformational changes (e.g., to accelerate endosomal escape of the cargo). In an embodiment, a stimuli-cleavable polymer is used, e.g., for release in a cellular compartment. For example, disulfide-based cationic polymers that are cleaved in the reducing cellular environment can be used.

[0480] In an embodiment, the delivery vehicle is a biological non-viral delivery vehicle. In an embodiment, the vehicle is an attenuated bacterium (e.g., naturally or artificially engineered to be invasive but attenuated to prevent pathogenesis and expressing the transgene (e.g., Listeria monocytogenes, certain Salmonella strains, Bifidobacterium longum, and modified Escherichia coli), bacteria having nutritional and tissue-specific tropism to target specific tissues, bacteria having modified surface proteins to alter target tissue specificity). In an embodiment, the vehicle is a genetically modified bacteriophage (e.g., engineered phages having large packaging capacity, less immunogenic, containing mammalian plasmid maintenance sequences and having incorporated targeting ligands). In an embodiment, the vehicle is a mammalian virus-like particle. For example, modified viral particles can be generated (e.g., by purification of the “empty” particles followed by ex vivo assembly of the virus with the desired cargo). The vehicle can also be engineered to incorporate targeting ligands to alter target tissue specificity. In an embodiment, the vehicle is a biological liposome. For example, the biological liposome is a phospholipid-based particle derived from human cells (e.g., erythrocyte ghosts, which are red blood cells broken down into spherical structures derived from the subject (e.g., tissue targeting can be achieved by attachment of various tissue or cell-specific ligands), or secretory exosomes—subject (i.e., patient) derived membrane-bound nanovesicle (30-100 nm) of endocytic origin (e.g., can be produced from various cell types and can therefore be taken up by cells without the need of for targeting ligands).

[0481] In an embodiment, one or more nucleic acid molecules (e.g., DNA molecules) other than the components of a Cas system, e.g., the Cas9 molecule component and/or the gRNA molecule component described herein, are delivered. In an embodiment, the nucleic acid molecule is delivered at the same time as one or more of the components of the Cas system are delivered. In an embodiment, the nucleic acid molecule is delivered before or after (e.g., less than about 30 minutes, 1 hour, 2 hours, 3 hours, 6 hours, 9 hours, 12 hours, 1 day, 2 days, 3 days, 1 week, 2 weeks, or 4 weeks) one or more of the components of the Cas9 system are delivered. In an embodiment, the nucleic acid molecule is delivered by a different means than one or more of the components of the Cas9 system, e.g., the Cas9 molecule component and/or the gRNA molecule component, are delivered. The nucleic acid molecule can be delivered by any of the delivery methods described herein. For example, the nucleic acid molecule can be delivered by a viral vector, e.g., an integration-deficient lentivirus, and the Cas9 molecule component and/or the gRNA molecule component can be delivered by electroporation, e.g., such that the toxicity caused by nucleic acids (e.g., DNAs) can be reduced. In an embodiment, the nucleic acid molecule encodes a therapeutic protein, e.g., a protein described herein. In an embodiment, the nucleic acid molecule encodes an RNA molecule, e.g., an RNA molecule described herein.

### Delivery of RNA Encoding a Cas9 Molecule

[0482] RNA encoding Cas9 molecules (e.g., active Cas9 molecules, inactive Cas9 molecules or inactive Cas9 fusion proteins) and/or gRNA molecules, can be delivered into cells, e.g., target cells described herein, by art-known methods or as described herein. For example, Cas9-encoding and/or gRNA-encoding RNA can be delivered, e.g., by microinjection, electroporation, lipid-mediated transfection, peptide-mediated delivery, or a combination thereof.

### Delivery of Cas9 Molecule as Protein

[0483] Cas9 molecules (e.g., active Cas9 molecules, inactive Cas9 molecules or inactive Cas9 fusion proteins) can be delivered into cells by art-known methods or as described herein. For example, Cas9 protein molecules can be delivered, e.g., by microinjection, electroporation, lipid-mediated transfection, peptide-mediated delivery, cell squeezing or abrasion (e.g., by nanoneedles) or a combination thereof. Delivery can be accompanied by DNA encoding a gRNA or by a gRNA, e.g., by precomplexing the gRNA and the Cas9 protein in a ribonuclear protein complex (RNP).

[0484] In an aspect the Cas9 molecule, e.g., as described herein, is delivered as a protein and the gRNA molecule is delivered as one or more RNAs (e.g., as a dgRNA or sgRNA, as described herein). In embodiments, the Cas9 protein is complexed with the gRNA molecule prior to delivery to a cell, e.g., as described herein, as a ribonuclear protein complex (“RNP”). In embodiments, the RNP can be delivered into cells, e.g., described herein, by any art-known method, e.g., electroporation. As described herein, and without being bound by theory, it can be preferable to use a gRNA molecule and Cas9 molecule which result in high % editing at the target sequence (e.g., >85%, >90%, >95%, >98%, or >99%) in the target cell, e.g., described herein, even when the concentration of RNP delivered to the cell is reduced. Again, without being bound by theory, delivering a reduced or low concentration of RNP comprising a gRNA molecule that produces a high % editing at the target sequence in the target cell (including at the low RNP concentration), can be beneficial because it may reduce the frequency and number of off-target editing events. In one aspect, where a low or reduced concentration of RNP is to be used, the following exemplary procedure can be used to generate the RNP with a dgRNA molecule:
[0485] 1. Provide the Cas9 molecule and the tracr in solution at a high concentration (e.g., a concentration higher than the final RNP concentration to be delivered to the cell), and allow the two components to equilibrate;
[0486] 2. Provide the crRNA molecule, and allow the components to equilibrate (thereby forming a high-concentration solution of the RNP);
[0487] 3. Dilute the RNP solution to the desired concentration;
[0488] 4. Deliver said RNP at said desired concentration to the target cells, e.g., by electroporation.

[0489] The above procedure may be modified for use with sgRNA molecules by omitting step 2, above, and in step 1, providing the Cas9 molecule and the sgRNA molecule in solution at high concentration, and allowing the components to equilibrate. In embodiments, the Cas9 molecule and each gRNA component are provided in solution at a 1:2 ratio (Cas9:gRNA), e.g., a 1:2 molar ratio of Cas9:gRNA molecule. Where dgRNA molecules are used, the ratio, e.g., molar ratio, is 1:2:2 (Cas9:tracr:crRNA). In embodiments, the RNP is formed at a concentration of 20 uM or higher, e.g., a concentration from about 20 uM to about 50 uM. In embodiments, the RNP is formed at a concentration of 10 uM or higher, e.g., a concentration from about 10 uM to about 30 uM. In embodiments, the RNP is diluted to a final concentration of 10 uM or less (e.g., a concentration from about 0.01 uM to about 10 uM) in a solution comprising the target cell (e.g., described herein) for delivery to said target cell. In embodiments, the RNP is diluted to a final concentration of 3 uM or less (e.g., a concentration from about 0.01 uM to about 3 uM) in a solution comprising the target cell (e.g., described herein) for delivery to said target cell. In embodiments, the RNP is diluted to a final concentration of 1 uM or less (e.g., a concentration from about 0.01 uM to about 1 uM) in a solution comprising the target cell (e.g., described herein) for delivery to said target cell. In embodiments, the RNP is diluted to a final concentration of 0.3 uM or less (e.g., a concentration from about 0.01 uM to about 0.3 uM) in a solution comprising the target cell (e.g., described herein) for delivery to said target cell. In embodiments, the RNP is provided at a final concentration of about 3 uM in a solution comprising the target cell (e.g., described herein) for delivery to said target cell. In embodiments, the RNP is provided at a final concentration of about 2 uM in a solution comprising the target cell (e.g., described herein) for delivery to said target cell. In embodiments, the RNP is provided at a final concentration of about 1 uM in a solution comprising the target cell (e.g., described herein) for delivery to said target cell. In embodiments, the RNP is provided at a final concentration of about 0.3 uM in a solution comprising the target cell (e.g., described herein) for delivery to said target cell. In embodiments, the RNP is provided at a final concentration of about 0.1 uM in a solution comprising the target cell (e.g., described herein) for delivery to said target cell. In embodiments, the RNP is provided at a final concentration of about 0.05 uM in a solution comprising the target cell (e.g., described herein) for delivery to said target cell. In embodiments, the RNP is provided at a final concentration of about 0.03 uM in a solution comprising the target cell (e.g., described herein) for delivery to said target cell. In embodiments, the RNP is provided at a final concentration of about 0.01 uM in a solution comprising the target cell (e.g., described herein) for delivery to said target cell. In embodiments, the RNP is formulated in a medium suitable for electroporation. In embodiments, the RNP is delivered to cells, e.g., HSPC cells, e.g., as described herein, by electroporation, e.g., using electroporation conditions described herein.

[0490] In aspects, the components of the gene editing system (e.g., CRISPR system) and/or nucleic acid encoding one or more components of the gene editing system (e.g., CRISPR system) are introduced into the cells by mechanically perturbing the cells, for example, by passing said cells through a pore or channel which constricts the cells. Such perturbation may be accomplished in a solution comprising the components of the gene editing system (e.g., CRISPR system) and/or nucleic acid encoding one or more components of the gene editing system (e.g., CRISPR system), e.g., as described herein. In embodiments, the perturbation is accomplished using a TRIAMF system, e.g., as described herein, for example, in the Examples and in PCT patent application PCT/US17/54110 (incorporated herein by reference in its entirety).

### Bi-Modal or Differential Delivery of Components

[0491] Separate delivery of the components of a Cas system, e.g., the Cas9 molecule component and the gRNA molecule component, and more particularly, delivery of the components by differing modes, can enhance performance, e.g., by improving tissue specificity and safety.

[0492] In an embodiment, the Cas9 molecule and the gRNA molecule are delivered by different modes, or as sometimes referred to herein as differential modes. Different or differential modes, as used herein, refer modes of delivery that confer different pharmacodynamic or pharmacokinetic properties on the subject component molecule, e.g., a Cas9 molecule, gRNA molecule, or template nucleic acid. For example, the modes of delivery can result in different tissue distribution, different half-life, or different temporal distribution, e.g., in a selected compartment, tissue, or organ.

[0493] Some modes of delivery, e.g., delivery by a nucleic acid vector that persists in a cell, or in progeny of a cell, e.g., by autonomous replication or insertion into cellular nucleic acid, result-in more persistent expression of and presence of a component.

### X. Methods of Treatment

[0494] Without being bound by theory, the invention here is based in part on the surprising finding of the linkage between ZNF644 gene expression/protein activity and the hemoglobin F (HbF) production. As demonstrated in the examples and figures, knocking down or knocking out ZNF644 gene or ZNF644 protein in cells (by various modalities/compositions described herein) significantly increased HbF induction in those cells, thereby treating HbF-associated conditions and disorders (e.g., hemoglobinopathies, e.g., sickle cell disease and beta thalassemia).

[0495] The Cas9 systems, e.g., one or more gRNA molecules and one or more Cas9 molecules, described herein are useful for the treatment of disease in a mammal, e.g., in a human. The terms “treat,” “treated,” “treating,” and “treatment,” include the administration of cas9 systems, e.g., one or more gRNA molecules and one or more cas9 molecules, to cells to prevent or delay the onset of the symptoms, complications, or biochemical indicia of a disease, alleviating the symptoms or arresting or inhibiting further development of the disease, condition, or disorder. Treatment may also include the administration of one or more (e.g., a population of) cells, e.g., HSPCs, that have been modified by the introduction of a gRNA molecule (or more than one gRNA molecule) of the present invention, or by the introduction of a CRISPR system as described herein, or by any of the methods of preparing said cells described herein, to prevent or delay the onset of the symptoms, complications, or biochemical indicia of a disease, alleviating the symptoms or arresting or inhibiting further development of the disease, condition, or disorder. Treatment may be prophylactic (to prevent or delay the onset of the disease, or to prevent the manifestation of clinical or subclinical symptoms thereof) or therapeutic suppression or alleviation of symptoms after the manifestation of the disease. Treatment can be measured by the therapeutic measures described herein. Thus, the methods of “treatment” of the present invention also include administration of cells altered by the introduction of a cas9 system (e.g., one or more gRNA molecules and one or more Cas9 molecules) into said cells to a subject in order to cure, reduce the severity of, or ameliorate one or more symptoms of a disease or condition, in order to prolong the health or survival of a subject beyond that expected in the absence of such treatment. For example, “treatment” includes the alleviation of a disease symptom in a subject by at least 5%, 6%, 7%, 8%, 9%, 10%, 11%, 12%, 13%, 14%, 15%, 16%, 17%, 18%, 19%, 20%, 25%, 30%, 35%, 40%, 45%, 50%, 55%, 60%, 65%, 70%, 75%, 80%, 85%, 90%, 95% or more.

[0496] Cas9 systems comprising gRNA molecules comprising the targeting domains described herein, e.g., in Table 1, and the methods and cells (e.g., as described herein) are useful for the treatment of hemoglobinopathies.

### Delivery Timing

[0497] In an embodiment, one or more nucleic acid molecules (e.g., DNA molecules) other than the components of a Cas system, e.g., the Cas9 molecule component and/or the gRNA molecule component described herein, are delivered. In an embodiment, the nucleic acid molecule is delivered at the same time as one or more of the components of the Cas system are delivered. In an embodiment, the nucleic acid molecule is delivered before or after (e.g., less than about 30 minutes, 1 hour, 2 hours, 3 hours, 6 hours, 9 hours, 12 hours, 1 day, 2 days, 3 days, 1 week, 2 weeks, or 4 weeks) one or more of the components of the Cas system are delivered. In an embodiment, the nucleic acid molecule is delivered by a different means than one or more of the components of the Cas system, e.g., the Cas9 molecule component and/or the gRNA molecule component, are delivered. The nucleic acid molecule can be delivered by any of the delivery methods described herein. For example, the nucleic acid molecule can be delivered by a viral vector, e.g., an integration-deficient lentivirus, and the Cas9 molecule component and/or the gRNA molecule component can be delivered by electroporation, e.g., such that the toxicity caused by nucleic acids (e.g., DNAs) can be reduced. In an embodiment, the nucleic acid molecule encodes a therapeutic protein, e.g., a protein described herein. In an embodiment, the nucleic acid molecule encodes an RNA molecule, e.g., an RNA molecule described herein.

### Bi-Modal or Differential Delivery of Components

[0498] Separate delivery of the components of a Cas system, e.g., the Cas9 molecule component and the gRNA molecule component, and more particularly, delivery of the components by differing modes, can enhance performance, e.g., by improving tissue specificity and safety. In an embodiment, the Cas9 molecule and the gRNA molecule are delivered by different modes, or as sometimes referred to herein as differential modes. Different or differential modes, as used herein, refer modes of delivery, that confer different pharmacodynamic or pharmacokinetic properties on the subject component molecule, e.g., a Cas9 molecule, gRNA molecule, template nucleic acid, or payload. E.g., the modes of delivery can result in different tissue distribution, different half-life, or different temporal distribution, e.g., in a selected compartment, tissue, or organ.

[0499] Some modes of delivery, e.g., delivery by a nucleic acid vector that persists in a cell, or in progeny of a cell, e.g., by autonomous replication or insertion into cellular nucleic acid, result in more persistent expression of and presence of a component. Examples include viral, e.g., adeno associated virus or lentivirus, delivery.

[0500] By way of example, the components, e.g., a Cas9 molecule and a gRNA molecule, can be delivered by modes that differ in terms of resulting half-life or persistent of the delivered component the body, or in a particular compartment, tissue or organ. In an embodiment, a gRNA molecule can be delivered by such modes. The Cas9 molecule component can be delivered by a mode which results in less persistence or less exposure of its to the body or a particular compartment or tissue or organ.

[0501] More generally, in an embodiment, a first mode of delivery is used to deliver a first component and a second mode of delivery is used to deliver a second component. The first mode of delivery confers a first pharmacodynamic or pharmacokinetic property. The first pharmacodynamic property can be, e.g., distribution, persistence, or exposure, of the component, or of a nucleic acid that encodes the component, in the body, a compartment, tissue or organ. The second mode of delivery confers a second pharmacodynamic or pharmacokinetic property. The second pharmacodynamic property can be, e.g., distribution, persistence, or exposure, of the component, or of a nucleic acid that encodes the component, in the body, a compartment, tissue or organ.

[0502] In an embodiment, the first pharmacodynamic or pharmacokinetic property, e.g., distribution, persistence or exposure, is more limited than the second pharmacodynamic or pharmacokinetic property.

[0503] In an embodiment, the first mode of delivery is selected to optimize, e.g., minimize, a pharmacodynamic or pharmacokinetic property, e.g., distribution, persistence or exposure.

[0504] In an embodiment, the second mode of delivery is selected to optimize, e.g., maximize, a pharmacodynamic or pharmacokinetic property, e.g., distribution, persistence or exposure.

[0505] In an embodiment, the first mode of delivery comprises the use of a relatively persistent element, e.g., a nucleic acid, e.g., a plasmid or viral vector, e.g., an AAV or lentivirus. As such vectors are relatively persistent product transcribed from them would be relatively persistent.

[0506] In an embodiment, the second mode of delivery comprises a relatively transient element, e.g., an RNA or protein.

[0507] In an embodiment, the first component comprises gRNA, and the delivery mode is relatively persistent, e.g., the gRNA is transcribed from a plasmid or viral vector, e.g., an AAV or lentivirus. Transcription of these genes would be of little physiological consequence because the genes do not encode for a protein product, and the gRNAs are incapable of acting in isolation. The second component, a Cas9 molecule, is delivered in a transient manner, for example as mRNA or as protein, ensuring that the full Cas9 molecule/gRNA molecule complex is only present and active for a short period of time.

[0508] Furthermore, the components can be delivered in different molecular form or with different delivery vectors that complement one another to enhance safety and tissue specificity.

[0509] Use of differential delivery modes can enhance performance, safety and efficacy. For example, the likelihood of an eventual off-target modification can be reduced. Delivery of immunogenic components, e.g., Cas9 molecules, by less persistent modes can reduce immunogenicity, as peptides from the bacterially-derived Cas enzyme are displayed on the surface of the cell by MHC molecules. A two-part delivery system can alleviate these drawbacks.

[0510] Differential delivery modes can be used to deliver components to different, but overlapping target regions. The formation of active complex is minimized outside the overlap of the target regions. Thus, in an embodiment, a first component, e.g., a gRNA molecule is delivered by a first delivery mode that results in a first spatial, e.g., tissue, distribution. A second component, e.g., a Cas9 molecule is delivered by a second delivery mode that results in a second spatial, e.g., tissue, distribution. In an embodiment, the first mode comprises a first element selected from a liposome, nanoparticle, e.g., polymeric nanoparticle, and a nucleic acid, e.g., viral vector. The second mode comprises a second element selected from the group. In an embodiment, the first mode of delivery comprises a first targeting element, e.g., a cell specific receptor or an antibody, and the second mode of delivery does not include that element. In an embodiment, the second mode of delivery comprises a second targeting element, e.g., a second cell specific receptor or second antibody.

[0511] When the Cas9 molecule is delivered in a virus delivery vector, a liposome, or polymeric nanoparticle, there is the potential for delivery to and therapeutic activity in multiple tissues, when it may be desirable to only target a single tissue. A two-part delivery system can resolve this challenge and enhance tissue specificity. If the gRNA molecule and the Cas9 molecule are packaged in separated delivery vehicles with distinct but overlapping tissue tropism, the fully functional complex is only be formed in the tissue that is targeted by both vectors.

[0512] Candidate Cas molecules, e.g., Cas9 molecules, candidate gRNA molecules, candidate Cas9 molecule/gRNA molecule complexes, and candidate CRISPR systems, can be evaluated by art-known methods or as described herein. For example, exemplary methods for evaluating the endonuclease activity of Cas9 molecule are described, e.g., in Jinek et al., SCIENCE 2012; 337(6096):816-821.

### Hemoglobinopathies

[0513] Hemoglobinopathies encompass a number of anemias of genetic origin in which there is a decreased production and/or increased destruction (hemolysis) of red blood cells (RBCs). These also include genetic defects that result in the production of abnormal hemoglobins with a concomitant impaired ability to maintain oxygen concentration. Some such disorders involve the failure to produce normal β-globin in sufficient amounts, while others involve the failure to produce normal β-globin entirely. These disorders associated with the β-globin protein are referred to generally as β-hemoglobinopathies. For example, β-thalassemias result from a partial or complete defect in the expression of the β-globin gene, leading to deficient or absent HbA. Sickle cell anemia results from a point mutation in the β-globin structural gene, leading to the production of an abnormal (sickle) hemoglobin (HbS). HbS is prone to polymerization, particularly under deoxygenated conditions. HbS RBCs are more fragile than normal RBCs and undergo hemolysis more readily, leading eventually to anemia.

[0514] In an embodiment, a hemoglobinopathies-associated gene is targeted, using the Cas9 molecule and gRNA molecule described herein. Exemplary targets include, e.g., genes associated with control of the gamma-globin genes. In an embodiment, the target is a nondeletional HPFH region.

[0515] Fetal hemoglobin (also hemoglobin F or HbF or a2y2) is a tetramer of two adult alpha-globin polypeptides and two fetal beta-like gamma-globin polypeptides. HbF is the main oxygen transport protein in the human fetus during the last seven months of development in the uterus and in the newborn until roughly 6 months old. Functionally, fetal hemoglobin differs most from adult hemoglobin in that it is able to bind oxygen with greater affinity than the adult form, giving the developing fetus better access to oxygen from the mother's bloodstream.

[0516] In newborns, fetal hemoglobin is nearly completely replaced by adult hemoglobin by approximately 6 months postnatally. In adults, fetal hemoglobin production can be reactivated pharmacologically, which is useful in the treatment of diseases such as hemoglobinopathies. For example, in certain patients with hemoglobinopathies, higher levels of gamma-globin expression can partially compensate for defective or impaired beta-globin gene production, which can ameliorate the clinical severity in these diseases. Increased HbF levels or F-cell (HbF containing erythrocyte) numbers can ameliorate the disease severity of hemoglobinopathies, e.g., beta-thalassemia major and sickle cell anemia.

### Sickle Cell Diseases

[0517] Sickle cell disease is a group of disorders that affects hemoglobin. People with this disorder have atypical hemoglobin molecules (hemoglobin S), which can distort red blood cells into a sickle, or crescent, shape. Characteristic features of this disorder include a low number of red blood cells (anemia), repeated infections, and periodic episodes of pain.

[0518] Mutations in the HBB gene cause sickle cell disease. The HBB gene provides instructions for making beta-globin. Various versions of beta-globin result from different mutations in the HBB gene. One particular HBB gene mutation produces an abnormal version of beta-globin known as hemoglobin S (HbS). Other mutations in the HBB gene lead to additional abnormal versions of beta-globin such as hemoglobin C (HbC) and hemoglobin E (HbE). HBB gene mutations can also result in an unusually low level of beta-globin, i.e., beta thalassemia.

[0519] In people with sickle cell disease, at least one of the beta-globin subunits in hemoglobin is replaced with hemoglobin S. In sickle cell anemia, which is a common form of sickle cell disease, hemoglobin S replaces both beta-globin subunits in hemoglobin. In other types of sickle cell disease, just one beta-globin subunit in hemoglobin is replaced with hemoglobin S. The other beta-globin subunit is replaced with a different abnormal variant, such as hemoglobin C. For example, people with sickle-hemoglobin C (HbSC) disease have hemoglobin molecules with hemoglobin S and hemoglobin C instead of beta-globin. If mutations that produce hemoglobin S and beta thalassemia occur together, individuals have hemoglobin S-beta thalassemia (HbSBetaThal) disease.

### Beta Thalassemia

[0520] Beta thalassemia is a blood disorder that reduces the production of hemoglobin. In people with beta thalassemia, low levels of hemoglobin lead to a lack of oxygen in many parts of the body. Affected individuals also have a shortage of red blood cells (anemia), which can cause pale skin, weakness, fatigue, and more serious complications. People with beta thalassemia are at an increased risk of developing abnormal blood clots.

[0521] Beta thalassemia is classified into two types depending on the severity of symptoms: thalassemia major (also known as Cooley's anemia) and thalassemia intermedia. Of the two types, thalassemia major is more severe.

[0522] Mutations in the HBB gene cause beta thalassemia. The HBB gene provides instructions for making beta-globin. Some mutations in the HBB gene prevent the production of any beta-globin. The absence of beta-globin is referred to as beta-zero (B°) thalassemia. Other HBB gene mutations allow some beta-globin to be produced but in reduced amounts, i.e., beta-plus (B*) thalassemia. People with both types have been diagnosed with thalassemia major and thalassemia intermedia.

[0523] In an embodiment, a Cas9 molecule/gRNA molecule complex targeting a first gene or locus is used to treat a disorder characterized by a second gene, e.g., a mutation in a second gene. By way of example, targeting of the first gene, e.g., by editing or payload delivery, can compensate for, or inhibit further damage from, the effect of a second gene, e.g., a mutant second gene. In an embodiment the allele(s) of the first gene carried by the subject is not causative of the disorder.

[0524] In one aspect, the invention relates to the treatment of a mammal, e.g., a human, in need of increased fetal hemoglobin (HbF).

[0525] In one aspect, the invention relates to the treatment of a mammal, e.g., a human, that has been diagnosed with, or is at risk of developing, a hemoglobinopathy.

[0526] In one aspect, the hemoglobinopathy is a β-hemoglobinopathy. In one aspect, the hemoglobinopathy is sickle cell disease. In one aspect, the hemoglobinopathy is beta thalassemia.

### Methods of Treatment of Hemoglobinopathies

[0527] In another aspect the invention provides methods of treatment. In aspects, the gRNA molecules, CRISPR systems and/or cells of the invention are used to treat a patient in need thereof. In aspects, the patient is a mammal, e.g., a human. In aspects, the patient has a hemoglobinopathy. In embodiments, the patient has sickle cell disease. In embodiments, the patient has beta thalassemia.

[0528] In one aspect, the method of treatment comprises administering to a mammal, e.g., a human, one or more gRNA molecules, e.g., one or more gRNA molecules comprising a targeting domain described in Table 1, and one or more cas9 molecules described herein.

[0529] In one aspect, the method of treatment comprises administering to a mammal a cell population, wherein the cell population is a cell population from a mammal, e.g., a human, that has been administered one or more gRNA molecules, e.g., one or more gRNA molecules comprising a targeting domain described in Table 1, and one or more cas9 molecules described herein, e.g., a CRISPR system as described herein. In one embodiment, the administration of the one or more gRNA molecules or CRISPR systems to the cell is accomplished in vivo. In one embodiment the administration of the one or more gRNA molecules or CRISPR systems to the cell is accomplished ex vivo.

[0530] In one aspect, the method of treatment comprises administering to the mammal, e.g., the human, an effective amount of a cell population comprising cells which comprise or at one time comprised one or more gRNA molecules, e.g., one or more gRNA molecules comprising a targeting domain described in Table 1, and one or more cas9 molecules described herein, or the progeny of said cells. In one embodiment, the cells are allogeneic to the mammal. In one embodiment, the cells are autologous to the mammal. In one embodiment the cells are harvested from the mammal, manipulated ex vivo, and returned to the mammal.

[0531] In aspects, the cells comprising or which at one time comprised one or more gRNA molecules, e.g., one or more gRNA molecules comprising a targeting domain described in Table 1, and one or more cas9 molecules described herein, or the progeny of said cells, comprise stem cells or progenitor cells. In one aspect, the stem cells are hematopoietic stem cells. In one aspect, the progenitor cells are hematopoietic progenitor cells. In one aspect, the cells comprise both hematopoietic stem cells and hematopoietic progenitor cells, e.g., are HSPCs. In one aspect, the cells comprise, e.g., consist of, CD34+ cells. In one aspect the cells are substantially free of CD34− cells. In one aspect, the cells comprise, e.g., consist of, CD34+/CD90+ stem cells. In one aspect, the cells comprise, e.g., consist of, CD34+/CD90− cells. In an aspect, the cells are a population comprising one or more of the cell types described above or described herein.

[0532] In one embodiment, the disclosure provides a method for treating a hemoglobinopathy, e.g., sickle cell disease or beta-thalassemia, or a method for increasing fetal hemoglobin expression in a mammal, e.g., a human, in need thereof, the method comprising:
[0533] a) providing, e.g., harvesting or isolating, a population of HSPCs (e.g., CD34+ cells) from a mammal;
[0534] b) providing said cells ex vivo, e.g., in a cell culture medium, optionally in the presence of an effective amount of a composition comprising at least one stem cell expander, whereby said population of HSPCs (e.g., CD34+ cells) expands to a greater degree than an untreated population;
[0535] c) contacting the population of HSPCs (e.g., CD34+ cells) with an effective amount of: a composition comprising at least one gRNA molecule comprising a targeting domain described herein, e.g., a targeting domain described in Table 1, or a nucleic acid encoding said gRNA molecule, and at least one cas9 molecule, e.g., described herein, or a nucleic acid encoding said cas9 molecule, e.g., one or more RNPs as described herein, e.g., with a CRISPR system described herein;
[0536] d) causing at least one modification in at least a portion of the cells of the population (e.g., at least a portion of the HSPCs, e.g., CD34+ cells, of the population), whereby, e.g., when said HSPCs are differentiated into cells of an erythroid lineage, e.g., red blood cells, fetal hemoglobin expression is increased, e.g., relative to cells not contacted according to step c); and
[0537] f) returning a population of cells comprising said modified HSPCs (e.g., CD34+ cells) to the mammal.

[0538] In an aspect, the HSPCs are allogeneic to the mammal to which they are returned. In an aspect, the HSPCs are autologous to the mammal to which they are returned. In aspects, the HSPCs are isolated from bone marrow. In aspects, the HSPCs are isolated from peripheral blood, e.g., mobilized peripheral blood. In aspects, the mobilized peripheral blood is isolated from a subject who has been administered a G-CSF. In aspects, the mobilized peripheral blood is isolated from a subject who has been administered a mobilization agent other than G-CSF, for example, Plerixafor® (AMD3100). In other aspects, the mobilized peripheral blood is isolated from a subject who has been administered a combination of G-CSF and Plerixafor® (AMD3100)). In aspects, the HSPCs are isolated fromumbilical cord blood. In embodiments, the cells are derived from a hemoglobinopathy patient, for example a patient with sickle cell disease or a patient with a thalassemia, e.g., beta-thalassemia.

[0539] In further embodiments of the method, the method further comprises, after providing a population of HSPCs (e.g., CD34+ cells), e.g., from a source described above, the step of enriching the population of cells for HSPCs (e.g., CD34+ cells). In embodiments of the method, after said enriching, the population of cells, e.g., HSPCs, is substantially free of CD34− cells.

[0540] In embodiments, the population of cells which is returned to the mammal includes at least 70% viable cells. In embodiments, the population of cells which is returned to the mammal includes at least 75% viable cells. In embodiments, the population of cells which is returned to the mammal includes at least 80% viable cells. In embodiments, the population of cells which is returned to the mammal includes at least 85% viable cells. In embodiments, the population of cells which is returned to the mammal includes at least 90% viable cells. In embodiments, the population of cells which is returned to the mammal includes at least 95% viable cells. In embodiments, the population of cells which is returned to the mammal includes at least 99% viable cells. Viability can be determined by staining a representative portion of the population of cells for a cell viability marker, e.g., as known in the art.

[0541] In another embodiment, the disclosure provides a method for treating a hemoglobinopathy, e.g., sickle cell disease or beta-thalassemia, or a method for increasing fetal hemoglobin expression in a mammal, e.g., a human, in need thereof, the method comprising the steps of:
[0542] a) providing, e.g., harvesting or isolating, a population of HSPCs (e.g., CD34+ cells) of a mammal, e.g., from the bone marrow of a mammal;
[0543] b) isolating the CD34+ cells from the population of cells of step a);
[0544] c) providing said CD34+ cells ex vivo, and culturing said cells, e.g., in a cell culture medium, in the presence of an effective amount of a composition comprising at least one stem cell expander, e.g., (S)-2-(6-(2-(1H-indol-3-yl)ethylamino)-2-(5-fluoropyridin-3-yl)-9H-purin-9-yl)propan-1-ol, e.g., (S)-2-(6-(2-(1H-indol-3-yl)ethylamino)-2-(5-fluoropyridin-3-yl)-9H-purin-9-yl)propan-1-ol at a concentration of about 0.5 to about 0.75 micromolar, whereby said population of CD34+ cells expands to a greater degree than an untreated population;
[0545] d) introducing into the cells of the population CD34+ cells an effective amount of: a composition comprising a Cas9 molecule, e.g., as described herein, and a gRNA molecule, e.g., as described herein, e.g., optionally where the Cas9 molecule and the gRNA molecule are in the form of an RNP, e.g., as described herein, and optionally where said introduction is by electroporation, e.g., as described herein, of said RNP into said cells;
[0546] e) causing at least one genetic modification in at least a portion of the cells of the population (e.g., at least a portion of the HSPCs, e.g., CD34+ cells, of the population), whereby an indel, e.g., as described herein, is created at or near the genomic site complementary to the targeting domain of the gRNA introduced in step d);
[0547] f) optionally, additionally culturing said cells after said introducing, e.g., in a cell culture medium, in the presence of an effective amount of a composition comprising at least one stem cell expander, e.g., (S)-2-(6-(2-(1H-indol-3-yl)ethylamino)-2-(5-fluoropyridin-3-yl)-9H-purin-9-yl)propan-1-ol, e.g., (S)-2-(6-(2-(1H-indol-3-yl)ethylamino)-2-(5-fluoropyridin-3-yl)-9H-purin-9-yl)propan-1-ol at a concentration of about 0.5 to about 0.75 micromolar, such that the cells expand at least 2-fold, e.g., at least 4-fold, e.g., at least 5-fold;
[0548] g) cryopreserving said cells; and
[0549] h) returning the cells to the mammal, wherein, the cells returned to the mammal comprise cells that 1) maintain the ability to differentiate into cells of the erythroid lineage, e.g., red blood cells; 2) when differentiated into red blood cells, produce an increased level of fetal hemoglobin, e.g., relative to cells unmodified by the gRNA of step e), e.g., produce at least 6 picograms fetal hemoglobin per cell.

[0550] In an aspect, the HSPCs are allogeneic to the mammal to which they are returned. In an aspect, the HSPCs are autologous to the mammal to which they are returned. In aspects, the HSPCs are isolated from bone marrow. In aspects, the HSPCs are isolated from peripheral blood, e.g., mobilized peripheral blood. In aspects, the mobilized peripheral blood is isolated from a subject who has been administered a G-CSF. In aspects, the mobilized peripheral blood is isolated from a subject who has been administered a mobilization agent other than G-CSF, for example, Plerixafor® (AMD3100). In other aspects, the mobilized peripheral blood is isolated from a subject who has been administered a combination of G-CSF and Plerixafor® (AMD3100)). In aspects, the HSPCs are isolated fromumbilical cord blood. In embodiments, the cells are derived from a hemoglobinopathy patient, for example a patient with sickle cell disease or a patient with a thalassemia, e.g., beta-thalassemia.

[0551] In embodiments of the method above, the recited step b) results in a population of cells which is substantially free of CD34− cells.

[0552] In further embodiments of the method, the method further comprises, after providing a population of HSPCs (e.g., CD34+ cells), e.g., from a source described above, the population of cells is enriched for HSPCs (e.g., CD34+ cells).

[0553] In a further embodiments of these methods, the population of modified HSPCs (e.g., CD34+ stem cells) having the ability to differentiate with increased fetal hemoglobin expression is cryopreserved and stored prior to being reintroduced into the mammal. In embodiments, the cryopreserved population of HSPCs having the ability to differentiate into cells of the erythroid lineage, e.g., red blood cells, and/or when differentiated into cells of the erythroid lineage, e.g., red blood cells, produce an increased level of fetal hemoglobin is thawed and then reintroduced into the mammal. In a further embodiment of these methods, the method comprises chemotherapy and/or radiation therapy to remove or reduce the endogenous hematopoietic progenitor or stem cells in the mammal. In a further embodiment of these methods, the method does not comprise a step of chemotherapy and/or radiation therapy to remove or reduce the endogenous hematopoietic progenitor or stem cells in the mammal. In a further embodiment of these methods, the method comprises a chemotherapy and/or radiation therapy to reduce partially (e.g., partial lymphodepletion) the endogenous hematopoietic progenitor or stem cells in the mammal. In embodiments the patient is treated with a fully lymphodepleting dose of busulfan prior to reintroduction of the modified HSPCs to the mammal. In embodiments, the patient is treated with a partially lymphodepleting dose of busulfan prior to reintroduction of the modified HSPCs to the mammal. In embodiments, the patient is treated with HSC-targeted antibody-drug conjugates for conditioning. In embodiments, such HSC-targeted antibody-drug conjugates can be found in WO2018071871, the contents of which are incorporated herein by reference.

[0554] In embodiments, the cells are contacted with RNP comprising a Cas9 molecule, e.g., as described herein, complexed with a gRNA to ZNF644, e.g., as described herein (e.g., comprising a targeting domain listed in Table 1-Table 3.

[0555] In embodiments, the stem cell expander is Compound 1. In embodiments, the stem cell expander is Compound 2. In embodiments, the stem cell expander is Compound 3. In embodiments, the stem cell expander is (S)-2-(6-(2-(1H-indol-3-yl)ethylamino)-2-(5-fluoropyridin-3-yl)-9H-purin-9-yl)propan-1-ol. In embodiments, the stem cell expander is (S)-2-(6-(2-(1H-indol-3-yl)ethylamino)-2-(5-fluoropyridin-3-yl)-9H-purin-9-yl)propan-1-ol and is present at a concentration of 2-0.1 micromolar, e.g., 1-0.25 micromolar, e.g., 0.75-0.5 micromolar. In embodiments, the stem cell expander is a molecule described in WO2010/059401 (e.g., the molecule described in Example 1 of WO2010/059401).

[0556] In embodiments, the cells, e.g., HSPCs, e.g., as described herein, are cultured ex vivo for a period of about 1 hour to about 15 days, e.g., a period of about 12 hours to about 12 days, e.g., a period of about 12 hours to 4 days, e.g., a period of about 1 day to about 4 days, e.g., a period of about 1 day to about 2 days, e.g., a period of about 1 day or a period of about 2 days, prior to the step of contacting the cells with a CRISPR system, e.g., described herein. In embodiments, said culturing prior to said contacting step is in a composition (e.g., a cell culture medium) comprising a stem cell expander, e.g., described herein, e.g., (S)-2-(6-(2-(1H-indol-3-yl)ethylamino)-2-(5-fluoropyridin-3-yl)-9H-purin-9-yl)propan-1-ol, e.g., (S)-2-(6-(2-(1H-indol-3-yl)ethylamino)-2-(5-fluoropyridin-3-yl)-9H-purin-9-yl)propan-1-ol at a concentration of about 0.25 uM to about 1 uM, e.g., (S)-2-(6-(2-(1H-indol-3-yl)ethylamino)-2-(5-fluoropyridin-3-yl)-9H-purin-9-yl)propan-1-ol at a concentration of about 0.75-0.5 micromolar. In embodiments, the cells are cultured ex vivo for a period of no more than about 1 day, e.g., no more than about 18, 17, 16, 15, 14, 13, 12, 11, 10, 9, 8, 7, 6, 5, 4, 3, 2, or 1 hour(s) after the step of contacting the cells with a CRISPR system, e.g., described herein, e.g., in a cell culture medium which comprises a stem cell expander, e.g., described herein, e.g., (S)-2-(6-(2-(1H-indol-3-yl)ethylamino)-2-(5-fluoropyridin-3-yl)-9H-purin-9-yl)propan-1-ol, e.g., (S)-2-(6-(2-(1H-indol-3-yl)ethylamino)-2-(5-fluoropyridin-3-yl)-9H-purin-9-yl)propan-1-ol at a concentration of about 0.25 uM to about 1 uM, e.g., (S)-2-(6-(2-(1H-indol-3-yl)ethylamino)-2-(5-fluoropyridin-3-yl)-9H-purin-9-yl)propan-1-ol at a concentration of about 0.75-0.5 micromolar. In other embodiments, the cells are cultured ex vivo for a period of about 1 hour to about 15 days, e.g., a period of about 12 hours to about 10 days, e.g., a period of about 1 day to about 10 days, e.g., a period of about 1 day to about 5 days, e.g., a period of about 1 day to about 4 days, e.g., a period of about 2 days to about 4 days, e.g., a period of about 2 days, about 3 days or about 4 days, after the step of contacting the cells with a CRISPR system, e.g., described herein, in a cell culture medium, e.g., which comprises a stem cell expander, e.g., described herein, e.g., (S)-2-(6-(2-(1H-indol-3-yl)ethylamino)-2-(5-fluoropyridin-3-yl)-9H-purin-9-yl)propan-1-ol, e.g., (S)-2-(6-(2-(1H-indol-3-yl)ethylamino)-2-(5-fluoropyridin-3-yl)-9H-purin-9-yl)propan-1-ol at a concentration of about 0.25 uM to about 1 uM, e.g., (S)-2-(6-(2-(1H-indol-3-yl)ethylamino)-2-(5-fluoropyridin-3-yl)-9H-purin-9-yl)propan-1-ol at a concentration of about 0.75-0.5 micromolar. In embodiments, the cells are cultured ex vivo (e.g., cultured prior to said contacting step and/or cultured after said contacting step) for a period of about 1 hour to about 20 days, e.g., a period of about 6-12 days, e.g., a period of about 6, about 7, about 8, about 9, about 10, about 11, or about 12 days.

[0557] In embodiments, the population of cells comprising the modified HSPCs returned to the mammal comprises at least about 1 million cells (e.g., at least about 1 million CD34+ cells) per kg. In embodiments, the population of cells comprising the modified HSPCs returned to the mammal comprises at least about 2 million cells (e.g., at least about 2 million CD34+ cells) per kg. In embodiments, the population of cells comprising the modified HSPCs returned to the mammal comprises at least about 3 million cells (e.g., at least about 3 million CD34+ cells) per kg. In embodiments, the population of cells comprising the modified HSPCs returned to the mammal comprises at least about 4 million cells (e.g., at least about 4 million CD34+ cells) per kg. In embodiments, the population of cells comprising the modified HSPCs returned to the mammal comprises at least about 5 million cells (e.g., at least about 5 million CD34+ cells) per kg. In embodiments, the population of cells comprising the modified HSPCs returned to the mammal comprises at least about 6 million cells (e.g., at least about 6 million CD34+ cells) per kg. In embodiments, the population of cells comprising the modified HSPCs returned to the mammal comprises at least 1 million cells (e.g., at least 1 million CD34+ cells) per kg. In embodiments, the population of cells comprising the modified HSPCs returned to the mammal comprises at least 2 million cells (e.g., at least 2 million CD34+ cells) per kg. In embodiments, the population of cells comprising the modified HSPCs returned to the mammal comprises at least 3 million cells (e.g., at least 3 million CD34+ cells) per kg. In embodiments, the population of cells comprising the modified HSPCs returned to the mammal comprises at least 4 million cells (e.g., at least 4 million CD34+ cells) per kg. In embodiments, the population of cells comprising the modified HSPCs returned to the mammal comprises at least 5 million cells (e.g., at least 5 million CD34+ cells) per kg. In embodiments, the population of cells comprising the modified HSPCs returned to the mammal comprises at least 6 million cells (e.g., at least 6 million CD34+ cells) per kg. In embodiments, the population of cells comprising the modified HSPCs returned to the mammal comprises about 1 million cells (e.g., about 1 million CD34+ cells) per kg. In embodiments, the population of cells comprising the modified HSPCs returned to the mammal comprises about 2 million cells (e.g., about 2 million CD34+ cells) per kg. In embodiments, the population of cells comprising the modified HSPCs returned to the mammal comprises about 3 million cells (e.g., about 3 million CD34+ cells) per kg. In embodiments, the population of cells comprising the modified HSPCs returned to the mammal comprises about 4 million cells (e.g., about 4 million CD34+ cells) per kg. In embodiments, the population of cells comprising the modified HSPCs returned to the mammal comprises about 5 million cells (e.g., about 5 million CD34+ cells) per kg. In embodiments, the population of cells comprising the modified HSPCs returned to the mammal comprises about 6 million cells (e.g., about 6 million CD34+ cells) per kg. In embodiments, the population of cells comprising the modified HSPCs returned to the mammal comprises about 2×10⁶ cells (e.g., about 2×10⁶ CD34+ cells) per kg body weight of the patient. In embodiments, the population of cells comprising the modified HSPCs returned to the mammal comprises at least 2×10⁶ cells (e.g., about 2×10⁶ CD34+ cells) per kg body weight of the patient. In embodiments, the population of cells comprising the modified HSPCs returned to the mammal comprises between 2×10⁶ cells (e.g., about 2×10⁶ CD34+ cells) per kg body weight of the patient and 10×10⁶ cells (e.g., about 2×10⁶ CD34+ cells) per kg body weight of the patient. In embodiments, the cells comprising the modified cells are infused into the patient. In embodiments, before the cells comprising the modified HSPCs are infused into the patient, the patient is treated with a lymphodepleting therapy, for example, is treated with busulphan, for example is treated with a full lymphodepleting busulphan regimen, or for example is treated with a reduced intensity busulphan lymphodepleting regimen.

[0558] In embodiments, any of the methods described above results in the patient having at least 80% of its circulating CD34+ cells comprising an indel at or near the genomic site complementary to the targeting domain of the gRNA molecule used in the method, e.g., as measured at least 15 days, e.g., at least 20, at least 30, at least 40 at least 50 or at least 60 days after reintroduction of the cells into the mammal. Without being bound by theory, it has surprisingly been discovered herein that indels and indel patterns (including large deletions) observed when gene editing systems, e.g., CRISPR systems, e.g., CRISPR systems comprising a gRNA molecule targeting the ZNF644 gene region, e.g., as described herein, are introduced into HSPCs, and those cells are transplanted into organisms, certain gRNAs produce cells comprising indels and indel patterns (including large indels) that remain detectible in the edited cell population and its progeny, in the organism, and persist for more than 8 weeks, 12 weeks, 16 weeks or 20 weeks. Without being bound by theory, a cell population comprising an indel pattern or particular indel (including large deletion) that persists within a detectible cell population, for example, longer than 16 weeks or longer than 20 weeks after introduction into an organism (e.g., a patient), could be beneficial to producing a longer-term amelioration of a disease or condition, e.g. described herein (e.g., a hemoglobinopathy, e.g., sickle cell disease or a thalassemia) than cells (or their progeny) that upon introduction into an organism or patient lose one or more indels (including large deletions). In embodiments, the persisting indel or indel pattern is associated with upregulated fetal hemoglobin (e.g., in erythroid progeny of said cells). Thus, in embodiments, the present disclosure provides populations of cells, e.g., HSPCs, e.g., as described herein, which comprise one or more indels (including large deletions) which persist (e.g., remain detectible, e.g., in a cell population or its progeny) in the blood and/or bone marrow) for more than 8 weeks, more than 12 weeks, more than 16 weeks or more than 20 weeks after introduction into an organism, e.g., patient.

[0559] In embodiments, any of the methods described above results in the patient having at least 20% of its bone marrow CD34+ cells comprising an indel at or near the genomic site complementary to the targeting domain of the gRNA molecule used in the method, e.g., as measured at least 15 days, e.g., at least 20, at least 30, at least 40 at least 50 or at least 60 days after reintroduction of the cells into the mammal.

[0560] In embodiments, the HSPCs that are reintroduced into the mammal are able to differentiate in vivo into cells of the erythroid lineage, e.g., red blood cells, and said differentiated cells exhibit increased fetal hemoglobin levels, e.g., produce at least 6 picograms fetal hemoglobin per cell, e.g., at least 7 picograms fetal hemoglobin per cell, at least 8 picograms fetal hemoglobin per cell, at least 9 picograms fetal hemoglobin per cell, at least 10 picograms fetal hemoglobin per cell, e.g., between about 9 and about 10 picograms fetal hemoglobin per cell, e.g., such that the hemoglobinopathy is treated the mammal.

[0561] It will be understood that when a cell is characterized as having increased fetal hemoglobin, that includes embodiments in which a progeny, e.g., a differentiated progeny, of that cell exhibits increased fetal hemoglobin. For example, in the methods described herein, the altered or modified CD34+ cell (or cell population) may not express increased fetal hemoglobin, but when differentiated into cells of erythroid lineage, e.g., red blood cells, the cells express increased fetal hemoglobin, e.g., increased fetal hemoglobin relative to an unmodified or unaltered cell under similar conditions.

### XI. Culture Methods and Methods of Manufacturing Cells

[0562] The disclosure provides methods of culturing cells, e.g., HSPCs, e.g., hematopoietic stem cells, e.g., CD34+ cells modified, or to be modified, with the gRNA molecules described herein.

### DNA Repair Pathway Inhibitors

[0563] Without being bound by theory, it is believed that the pattern of indels produced by a given gRNA molecule at a particular target sequence is a product of each of the active DNA repair mechanisms within the cell (e.g., non-homologous end joining, microhomology-mediated end joining, etc.). Without being bound by theory, it is believed that a particularly favorable indel may be selected for or enriched for by contacting the cells to be edited with an inhibitor of a DNA repair pathway that does not produce the desired indel. Thus, the gRNA molecules, CRISPR systems, methods and other aspects of the invention may be performed in combination with such inhibitors. Examples of such inhibitors include those described in, e.g., WO2014/130955, the contents of which are hereby incorporated by reference in their entirety. In embodiment, the inhibitor is a DNAPKc inhibitor, e.g., NU7441.

### Stem Cell Expanders

[0564] In one aspect the invention relates to culturing the cells, e.g., HSPCs, e.g., CD34+ cells modified, or to be modified, with the gRNA molecules described herein, with one or more agents that result in an increased expansion rate, increased expansion level, or increased engraftment relative to cells not treated with the agent. Such agents are referred to herein as stem cell expanders.

[0565] In an aspect, the one or more agents that result in an increased expansion rate or increased expansion level, relative to cells not treated with the agent, e.g., the stem cell expander, comprises an agent that is an antagonist of the aryl hydrocarbon receptor (AHR) pathway. In aspects, the stem cell expander is a compound disclosed in WO2013/110198 or a compound disclosed in WO2010/059401, the contents of which are incorporated by reference in their entirety.

[0566] In one aspect, the one or more agents that result in an increased expansion rate or increased expansion level, relative to cells not treated with the agent, is a pyrimido[4,5-b]indole derivative, e.g., as disclosed in WO2013/110198, the contents of which are hereby incorporated by reference in their entirety. In one embodiment the agent is compound 1 ((1r,4r)-N¹-(2-benzyl-7-(2-methyl-2H-tetrazol-5-yl)-9H-pyrimido[4,5-b]indol-4-yl)cyclohexane-1,4-diamine):

[chemical structure]

[0567] In another aspect, the agent is Compound 2 (methyl 4-(3-piperidin-1-ylpropylamino)-9H-pyrimido[4,5-b]indole-7-carboxylate):

[chemical structure]

[0568] In another aspect, the one or more agents that result in an increased expansion rate or increased expansion level, relative to cells not treated with the agent, is an agent disclosed in WO2010/059401, the contents of which are hereby incorporated by reference in their entirety.

[0569] In one embodiment, the stem cell expander is compound 3: 4-(2-(2-(benzo[b]thiophen-3-yl)-9-isopropyl-9H-purin-6-ylamino)ethyl)phenol, i.e., is the compound from example 1 of WO2010/059401, having the following structure:

[chemical structure]

[0570] In another aspect, the stem cell expander is (S)-2-(6-(2-(1H-indol-3-yl)ethylamino)-2-(5-fluoropyridin-3-yl)-9H-purin-9-yl)propan-1-ol ((S)-2-(6-(2-(1H-indol-3-yl)ethylamino)-2-(5-fluoropyridin-3-yl)-9H-purin-9-yl)propan-1-ol, i.e., is the compound 157S according to WO2010/059401), having the following structure:

### (S)-2-(6-(2-(1H-indol-3-yl)ethylamino)-2-(5-fluoropyridin-3-yl)-9H-purin-9-yl)propan-ol

[chemical structure]

[0571] In embodiments the population of HSPCs is contacted with the stem cell expander, e.g., compound 1, compound 2, compound 3, (S)-2-(6-(2-(1H-indol-3-yl)ethylamino)-2-(5-fluoropyridin-3-yl)-9H-purin-9-yl)propan-1-ol, or combinations thereof (e.g., a combination of compound 1 and (S)-2-(6-(2-(1H-indol-3-yl)ethylamino)-2-(5-fluoropyridin-3-yl)-9H-purin-9-yl)propan-1-ol) before introduction of the CRISPR system (e.g., gRNA molecule and/or Cas9 molecule of the invention) to said HSPCs. In embodiments, the population of HSPCs is contacted with the stem cell expander, e.g., compound 1, compound 2, compound 3, (S)-2-(6-(2-(1H-indol-3-yl)ethylamino)-2-(5-fluoropyridin-3-yl)-9H-purin-9-yl)propan-1-ol, or combinations thereof (e.g., a combination of compound 1 and (S)-2-(6-(2-(1H-indol-3-yl)ethylamino)-2-(5-fluoropyridin-3-yl)-9H-purin-9-yl)propan-1-ol), after introduction of the CRISPR system (e.g., gRNA molecule and/or Cas9 molecule of the invention) to said HSPCs. In embodiments, the population of HSPCs is contacted with the stem cell expander, e.g., compound 1, compound 2, compound 3, (S)-2-(6-(2-(1H-indol-3-yl)ethylamino)-2-(5-fluoropyridin-3-yl)-9H-purin-9-yl)propan-1-ol, or combinations thereof (e.g., a combination of compound 1 and (S)-2-(6-(2-(1H-indol-3-yl)ethylamino)-2-(5-fluoropyridin-3-yl)-9H-purin-9-yl)propan-1-ol), both before and after introduction of the CRISPR system (e.g., gRNA molecule and/or Cas9 molecule of the invention) to said HSPCs.

[0572] In embodiments, the stem cell expander is present in an effective amount to increase the expansion level of the HSPCs, relative to HSPCs in the same media but for the absence of the stem cell expander. In embodiments, the stem cell expander is present at a concentration ranging from about 0.01 to about 10 uM, e.g., from about 0.1 uM to about 1 uM. In embodiments, the stem cell expander is present in the cell culture medium at a concentration of about 1 uM, about 950 nM, about 900 nM, about 850 nM, about 800 nM, about 750 nM, about 700 nM, about 650 nM, about 600 nM, about 550 nM, about 500 nM, about 450 nM, about 400 nM, about 350 nM, about 300 nM, about 250 nM, about 200 nM, about 150 nM, about 100 nM, about 50 nM, about 25 nM, or about 10 nM. In embodiments, the stem cell expander is present at a concentration ranging from about 500 nM to about 750 nM.

[0573] In embodiments, the stem cell expander is (S)-2-(6-(2-(1H-indol-3-yl)ethylamino)-2-(5-fluoropyridin-3-yl)-9H-purin-9-yl)propan-1-ol, which is present in the cell culture medium at a concentration ranging from about 0.01 to about 10 micromolar (uM). In embodiments, the stem cell expander is (S)-2-(6-(2-(1H-indol-3-yl)ethylamino)-2-(5-fluoropyridin-3-yl)-9H-purin-9-yl)propan-1-ol, which is present in the cell culture medium at a concentration ranging from about 0.1 to about 1 micromolar (uM). In embodiments, the stem cell expander is (S)-2-(6-(2-(1H-indol-3-yl)ethylamino)-2-(5-fluoropyridin-3-yl)-9H-purin-9-yl)propan-1-ol, which is present in the cell culture medium at a concentration of about 0.75 micromolar (uM). In embodiments, the stem cell expander is (S)-2-(6-(2-(1H-indol-3-yl)ethylamino)-2-(5-fluoropyridin-3-yl)-9H-purin-9-yl)propan-1-ol, which is present in the cell culture medium at a concentration of about 0.5 micromolar (uM). In embodiments of any of the foregoing, the cell culture medium additionally comprises compound 1.

[0574] In embodiments, the stem cell expander is a mixture of compound 1 and (S)-2-(6-(2-(1H-indol-3-yl)ethylamino)-2-(5-fluoropyridin-3-yl)-9H-purin-9-yl)propan-1-ol.

[0575] In embodiments, the cells of the invention are contacted with one or more stem cell expander molecules for a sufficient time and in a sufficient amount to cause a 2 to 10,000-fold expansion of CD34+ cells, e.g., a 2-1000-fold expansion of CD34+ cells, e.g., a 2-100-fold expansion of CD34+ cells, e.g., a 20-200-fold expansion of CD34+ cells. As described herein, the contacting with the one or more stem cell expanders may be before the cells are contacted with a CRISPR system, e.g., as described herein, after the cells are contacted with a CRISPR system, e.g., as described herein, or a combination thereof. In an embodiment, the cells are contacted with one or more stem cell expander molecules, e.g., (S)-2-(6-(2-(1H-indol-3-yl)ethylamino)-2-(5-fluoropyridin-3-yl)-9H-purin-9-yl)propan-1-ol, for a sufficient time and in a sufficient amount to cause at least a 2-fold expansion of CD34+ cells, e.g., CD34+ cells comprising an indel at or near the target site having complementarity to the targeting domain of the gRNA of the CRISPR/Cas9 system introduced into said cell. In an embodiment, the cells are contacted with one or more stem cell expander molecules, e.g., (S)-2-(6-(2-(1H-indol-3-yl)ethylamino)-2-(5-fluoropyridin-3-yl)-9H-purin-9-yl)propan-1-ol, for a sufficient time and in a sufficient amount to cause at least a 4-fold expansion of CD34+ cells, e.g., CD34+ cells comprising an indel at or near the target site having complementarity to the targeting domain of the gRNA of the CRISPR/Cas9 system introduced into said cell. In an embodiment, the cells are contacted with one or more stem cell expander molecules, e.g., (S)-2-(6-(2-(1H-indol-3-yl)ethylamino)-2-(5-fluoropyridin-3-yl)-9H-purin-9-yl)propan-1-ol, for a sufficient time and in a sufficient amount to cause at least a 5-fold expansion of CD34+ cells, e.g., CD34+ cells comprising an indel at or near the target site having complementarity to the targeting domain of the gRNA of the CRISPR/Cas9 system introduced into said cell. In an embodiment, the cells are contacted with one or more stem cell expander molecules for a sufficient time and in a sufficient amount to cause at least a 10-fold expansion of CD34+ cells. In an embodiment, the cells are contacted with one or more stem cell expander molecules for a sufficient time and in a sufficient amount to cause at least a 20-fold expansion of CD34+ cells. In an embodiment, the cells are contacted with one or more stem cell expander molecules for a sufficient time and in a sufficient amount to cause at least a 30-fold expansion of CD34+ cells. In an embodiment, the cells are contacted with one or more stem cell expander molecules for a sufficient time and in a sufficient amount to cause at least a 40-fold expansion of CD34+ cells. In an embodiment, the cells are contacted with one or more stem cell expander molecules for a sufficient time and in a sufficient amount to cause at least a 50-fold expansion of CD34+ cells. In an embodiment, the cells are contacted with one or more stem cell expander molecules for a sufficient time and in a sufficient amount to cause at least a 60-fold expansion of CD34+ cells. In embodiments, the cells are contacted with the one or more stem cell expanders for a period of about 1-60 days, e.g., about 1-50 days, e.g., about 1-40 days, e.g., about 1-30 days, e.g., 1-20 days, e.g., about 1-10 days, e.g., about 7 days, e.g., about 1-5 days, e.g., about 2-5 days, e.g., about 2-4 days, e.g., about 2 days or, e.g., about 4 days.

[0576] In embodiments, the cells, e.g., HSPCs, e.g., as described herein, are cultured ex vivo for a period of about 1 hour to about 10 days, e.g., a period of about 12 hours to about 5 days, e.g., a period of about 12 hours to 4 days, e.g., a period of about 1 day to about 4 days, e.g., a period of about 1 day to about 2 days, e.g., a period of about 1 day or a period of about 2 days, prior to the step of contacting the cells with a CRISPR system, e.g., described herein. In embodiments, said culturing prior to said contacting step is in a composition (e.g., a cell culture medium) comprising a stem cell expander, e.g., described herein, e.g., (S)-2-(6-(2-(1H-indol-3-yl)ethylamino)-2-(5-fluoropyridin-3-yl)-9H-purin-9-yl)propan-1-ol, e.g., (S)-2-(6-(2-(1H-indol-3-yl)ethylamino)-2-(5-fluoropyridin-3-yl)-9H-purin-9-yl)propan-1-ol at a concentration of about 0.25 uM to about 1 uM, e.g., (S)-2-(6-(2-(1H-indol-3-yl)ethylamino)-2-(5-fluoropyridin-3-yl)-9H-purin-9-yl)propan-1-ol at a concentration of about 0.75-0.5 micromolar. In embodiments, the cells are cultured ex vivo for a period of no more than about 1 day, e.g., no more than about 18, 17, 16, 15, 14, 13, 12, 11, 10, 9, 8, 7, 6, 5, 4, 3, 2, or 1 hour(s) after the step of contacting the cells with a CRISPR system, e.g., described herein, e.g., in a cell culture medium which comprises a stem cell expander, e.g., described herein, e.g., (S)-2-(6-(2-(1H-indol-3-yl)ethylamino)-2-(5-fluoropyridin-3-yl)-9H-purin-9-yl)propan-1-ol, e.g., (S)-2-(6-(2-(1H-indol-3-yl)ethylamino)-2-(5-fluoropyridin-3-yl)-9H-purin-9-yl)propan-1-ol at a concentration of about 0.25 uM to about 1 uM, e.g., (S)-2-(6-(2-(1H-indol-3-yl)ethylamino)-2-(5-fluoropyridin-3-yl)-9H-purin-9-yl)propan-1-ol at a concentration of about 0.75-0.5 micromolar. In other embodiments, the cells are cultured ex vivo for a period of about 1 hour to about 14 days, e.g., a period of about 12 hours to about 10 days, e.g., a period of about 1 day to about 10 days, e.g., a period of about 1 day to about 5 days, e.g., a period of about 1 day to about 4 days, e.g., a period of about 2 days to about 4 days, e.g., a period of about 2 days, about 3 days or about 4 days, after the step of contacting the cells with a CRISPR system, e.g., described herein, in a cell culture medium, e.g., which comprises a stem cell expander, e.g., described herein, e.g., (S)-2-(6-(2-(1H-indol-3-yl)ethylamino)-2-(5-fluoropyridin-3-yl)-9H-purin-9-yl)propan-1-ol, e.g., (S)-2-(6-(2-(1H-indol-3-yl)ethylamino)-2-(5-fluoropyridin-3-yl)-9H-purin-9-yl)propan-1-ol at a concentration of about 0.25 uM to about 1 uM, e.g., (S)-2-(6-(2-(1H-indol-3-yl)ethylamino)-2-(5-fluoropyridin-3-yl)-9H-purin-9-yl)propan-1-ol at a concentration of about 0.75-0.5 micromolar.

[0577] In embodiments, the cell culture medium is a chemically defined medium. In embodiments, the cell culture medium may additionally contain, for example, StemSpan SFEM (StemCell Technologies; Cat no. 09650). In embodiments, the cell culture medium may alternatively or additionally contain, for example, HSC Brew, GMP (Miltenyi). In embodiments, the cell culture media is serum free. In embodiments, the media may be supplemented with thrombopoietin (TPO), human Flt3 ligand (Flt-3L), human stem cell factor (SCF), human interleukin-6, L-glutamine, and/or penicillin/streptomycin. In embodiments, the media is supplemented with thrombopoietin (TPO), human Flt3 ligand (Flt-3L), human stem cell factor (SCF), human interleukin-6, and L-glutamine. In other embodiments, the media is supplemented with thrombopoietin (TPO), human Flt3 ligand (Flt-3L), human stem cell factor (SCF), and human interleukin-6. In other embodiments the media is supplemented with thrombopoietin (TPO), human Flt3 ligand (Flt-3L), and human stem cell factor (SCF), but not human interleukin-6. In other embodiments, the media is supplemented with human Flt3 ligand (Flt-3L), human stem cell factor (SCF), but not human thrombopoietin (TPO) or human interleukin-6. When present in the medium, the thrombopoietin (TPO), human Flt3 ligand (Flt-3L), human stem cell factor (SCF), human interleukin-6, and/or L-glutamine are each present in a concentration ranging from about 1 ng/mL to about 1000 ng/mL, e.g., a concentration ranging from about 10 ng/mL to about 500 ng/mL, e.g., a concentration ranging from about 10 ng/mL to about 100 ng/mL, e.g., a concentration ranging from about 25 ng/mL to about 75 ng/mL, e.g., a concentration of about 50 ng/mL. In embodiments, each of the supplemented components is at the same concentration. In other embodiments, each of the supplemented components is at a different concentration. In an embodiment, the medium comprises StemSpan SFEM (StemCell Technologies; Cat no. 09650), 50 ng/mL of thrombopoietin (Tpo), 50 ng/mL of human Flt3 ligand (Flt-3L), 50 ng/mL of human stem cell factor (SCF), and 50 ng/mL of human interleukin-6 (IL-6). In an embodiment, the medium comprises StemSpan SFEM (StemCell Technologies; Cat no. 09650), 50 ng/mL of thrombopoietin (Tpo), 50 ng/mL of human Flt3 ligand (Flt-3L), and 50 ng/mL of human stem cell factor (SCF), and does not comprise IL-6. In embodiments, the media further comprises a stem cell expander, e.g., (S)-2-(6-(2-(1H-indol-3-yl)ethylamino)-2-(5-fluoropyridin-3-yl)-9H-purin-9-yl)propan-1-ol, e.g., (S)-2-(6-(2-(1H-indol-3-yl)ethylamino)-2-(5-fluoropyridin-3-yl)-9H-purin-9-yl)propan-1-ol at a concentration of 0.75 μM. In embodiments, the media further comprises a stem cell expander, e.g., (S)-2-(6-(2-(1H-indol-3-yl)ethylamino)-2-(5-fluoropyridin-3-yl)-9H-purin-9-yl)propan-1-ol, e.g., (S)-2-(6-(2-(1H-indol-3-yl)ethylamino)-2-(5-fluoropyridin-3-yl)-9H-purin-9-yl)propan-1-ol at a concentration of 0.5 μM. In embodiments, the media further comprises 1% L-glutamine and 2% penicillin/streptomycin. In embodiments, the cell culture medium is serum free.

### XII. Combination Therapy

[0578] The present disclosure contemplates the use of the gRNA molecules described herein, or cells (e.g., hematopoietic stem cells, e.g., CD34+ cells) modified with the gRNA molecules described herein, in combination with one or more other therapeutic modalities and/or agents. Thus, in addition to the use of the gRNA molecules or cells modified with the gRNA molecules described herein, one may also administer to the subject one or more “standard” therapies for treating hemoglobinopathies.

[0579] The one or more additional therapies for treating hemoglobinopathies may include, for example, additional stem cell transplantation, e.g., hematopoietic stem cell transplantation. The stem cell transplantation may be allogeneic or autologous.

[0580] The one or more additional therapies for treating hemoglobinopathies may include, for example, blood transfusion and/or iron chelation (e.g., removal) therapy. Known iron chelation agents include, for example, deferoxamine and deferasirox.

[0581] The one or more additional therapies for treating hemoglobinopathies may include, for example, folic acid supplements, or hydroxyurea (e.g., 5-hydroxyurea). The one or more additional therapies for treating hemoglobinopathies may be hydroxyurea. In embodiments, the hydroxyurea may be administered at a dose of, for example, 10-35 mg/kg per day, e.g., 10-20 mg/kg per day. In embodiments, the hydroxyurea is administered at a dose of 10 mg/kg per day. In embodiments, the hydroxyurea is administered at a dose of 10 mg/kg per day. In embodiments, the hydroxyurea is administered at a dose of 20 mg/kg per day. In embodiments, the hydroxyurea is administered before and/or after the cell (or population of cells), e.g., CD34+ cell (or population of cells) of the invention, e.g., as described herein.

[0582] The one or more additional therapeutic agents may include, for example, an anti-p-selectin antibody, e.g., SelG1 (Selexys). P-selectin antibodies are described in, for example, PCT publication WO1993/021956, PCT publication WO1995/034324, PCT publication WO2005/100402, PCT publication WO2008/069999, US patent application publication US2011/0293617, U.S. Pat. Nos. 5,800,815, 6,667,036, 8,945,565, 8,377,440 and 9,068,001, the contents of each of which are incorporated herein in their entirety.

[0583] The one or more additional agents may include, for example, a small molecule which upregulates fetal hemoglobin. Examples of such molecules include TN1 (e.g., as described in Nam, T. et al., ChemMedChem 2011, 6, 777-780, DOI: 10.1002/cmdc.201000505, herein incorporated by reference).

[0584] The one or more additional therapies may also include irradiation or other bone marrow ablation therapies known in the art. An example of such a therapy is busulfan. Such additional therapy may be performed prior to introduction of the cells of the invention into the subject. In an embodiment the methods of treatment described herein (e.g., the methods of treatment that include administration of cells (e.g., HSPCs) modified by the methods described herein (e.g., modified with a CRISPR system described herein, e.g., to increase HbF production)), the method does not include the step of bone marrow ablation. In embodiments, the methods include a partial bone marrow ablation step.

[0585] The therapies described herein (e.g., comprising administering a population of HSPCs, e.g., HSPCs modified using a CRISPR system described herein) may also be combined with an additional therapeutic agent. In an embodiment, the additional therapeutic agent is an HDAC inhibitor, e.g., panobinostat. In an embodiment, the additional therapeutic is a compound described in PCT Publication No. WO2014/150256, e.g., a compound described in Table 1 of WO2014/150256, e.g., GBT440. Other examples of HDAC inhibitors include, for example, suberoylanilide hydroxamic acid (SAHA). The one or more additional agents may include, for example, a DNA methylation inhibitor. Such agents have been shown to increase the HbF induction in cells having reduced BCL 11a activity (e.g., Jian Xu et al, Science 334, 993 (2011); DOI: 0.1126/science.1211053, herein incorporated by reference). Other HDAC inhibitors include any HDAC inhibitor known in the art, for example, trichostatin A, HC toxin, DACI-2, FK228, DACI-14, depudicin, DACI-16, tubacin, NK57, MAZ1536, NK125, Scriptaid, Pyroxamide, MS-275, ITF-2357, MCG-D0103, CRA-024781, CI-994, and LBH589 (see, e.g., Bradner J E, et al., PNAS, 2010 (vol. 107:28), 12617-12622, herein incorporated by reference in its entirety).

[0586] The gRNA molecules described herein, or cells (e.g., hematopoietic stem cells, e.g., CD34+ cells) modified with the gRNA molecules described herein, and the co-therapeutic agent or co-therapy can be administered in the same formulation or separately. In the case of separate administration, the gRNA molecules described herein, or cells modified with the gRNA molecules described herein, can be administered before, after or concurrently with the co-therapeutic or co-therapy. One agent may precede or follow administration of the other agent by intervals ranging from minutes to weeks. In embodiments where two or more different kinds of therapeutic agents are applied separately to a subject, one would generally ensure that a significant period of time did not expire between the time of each delivery, such that these different kinds of agents would still be able to exert an advantageously combined effect on the target tissues or cells.

### XIII. Modified Nucleosides, Nucleotides, and Nucleic Acids

[0587] Modified nucleosides and modified nucleotides can be present in nucleic acids, e.g., particularly gRNA, but also other forms of RNA, e.g., mRNA, RNAi, or siRNA. As described herein “nucleoside” is defined as a compound containing a five-carbon sugar molecule (a pentose or ribose) or derivative thereof, and an organic base, purine or pyrimidine, or a derivative thereof. As described herein, “nucleotide” is defined as a nucleoside further comprising a phosphate group.

[0588] Modified nucleosides and nucleotides can include one or more of:
[0589] (i) alteration, e.g., replacement, of one or both of the non-linking phosphate oxygens and/or of one or more of the linking phosphate oxygens in the phosphodiester backbone linkage;
[0590] (ii) alteration, e.g., replacement, of a constituent of the ribose sugar, e.g., of the 2′ hydroxyl on the ribose sugar;
[0591] (iii) wholesale replacement of the phosphate moiety with “dephospho” linkers;
[0592] (iv) modification or replacement of a naturally occurring nucleobase, including with a non-canonical nucleobase;
[0593] (v) replacement or modification of the ribose-phosphate backbone;
[0594] (vi) modification of the 3′ end or 5′ end of the oligonucleotide, e.g., removal, modification or replacement of a terminal phosphate group or conjugation of a moiety, cap or linker; and
[0595] (vii) modification or replacement of the sugar.

[0596] The modifications listed above can be combined to provide modified nucleosides and nucleotides that can have two, three, four, or more modifications. For example, a modified nucleoside or nucleotide can have a modified sugar and a modified nucleobase. In an embodiment, every base of a gRNA is modified, e.g., all bases have a modified phosphate group, e.g., all are phosphorothioate groups. In an embodiment, all, or substantially all, of the phosphate groups of a unimolecular or modular gRNA molecule are replaced with phosphorothioate groups. In embodiments, one or more of the five 3′-terminal bases and/or one or more of the five 5′-terminal bases of the gRNA are modified with a phosphorothioate group.

[0597] In an embodiment, modified nucleotides, e.g., nucleotides having modifications as described herein, can be incorporated into a nucleic acid, e.g., a “modified nucleic acid.” In some embodiments, the modified nucleic acids comprise one, two, three or more modified nucleotides. In some embodiments, at least 5% (e.g., at least about 5%, at least about 10%, at least about 15%, at least about 20%, at least about 25%, at least about 30%, at least about 35%, at least about 40%, at least about 45%, at least about 50%, at least about 55%, at least about 60%, at least about 65%, at least about 70%, at least about 75%, at least about 80%, at least about 85%, at least about 90%, at least about 95%, or about 100%) of the positions in a modified nucleic acid are a modified nucleotides.

[0598] Unmodified nucleic acids can be prone to degradation by, e.g., cellular nucleases. For example, nucleases can hydrolyze nucleic acid phosphodiester bonds. Accordingly, in one aspect the modified nucleic acids described herein can contain one or more modified nucleosides or nucleotides, e.g., to introduce stability toward nucleases.

[0599] In some embodiments, the modified nucleosides, modified nucleotides, and modified nucleic acids described herein can exhibit a reduced innate immune response when introduced into a population of cells, both in vivo and ex vivo. The term “innate immune response” includes a cellular response to exogenous nucleic acids, including single stranded nucleic acids, generally of viral or bacterial origin, which involves the induction of cytokine expression and release, particularly the interferons, and cell death. In some embodiments, the modified nucleosides, modified nucleotides, and modified nucleic acids described herein can disrupt binding of a major groove interacting partner with the nucleic acid. In some embodiments, the modified nucleosides, modified nucleotides, and modified nucleic acids described herein can exhibit a reduced innate immune response when introduced into a population of cells, both in vivo and ex vivo, and also disrupt binding of a major groove interacting partner with the nucleic acid.

### Definitions of Chemical Groups

[0600] As used herein, “alkyl” is meant to refer to a saturated hydrocarbon group which is straight-chained or branched. Example alkyl groups include methyl (Me), ethyl (Et), propyl (e.g., n-propyl and isopropyl), butyl (e.g., n-butyl, isobutyl, t-butyl), pentyl (e.g., n-pentyl, isopentyl, neopentyl), and the like. An alkyl group can contain from 1 to about 20, from 2 to about 20, from 1 to about 12, from 1 to about 8, from 1 to about 6, from 1 to about 4, or from 1 to about 3 carbon atoms.

[0601] As used herein, “aryl” refers to monocyclic or polycyclic (e.g., having 2, 3 or 4 fused rings) aromatic hydrocarbons such as, for example, phenyl, naphthyl, anthracenyl, phenanthrenyl, indanyl, indenyl, and the like. In some embodiments, aryl groups have from 6 to about 20 carbon atoms.

[0602] As used herein, “alkenyl” refers to an aliphatic group containing at least one double bond. As used herein, “alkynyl” refers to a straight or branched hydrocarbon chain containing 2-12 carbon atoms and characterized in having one or more triple bonds. Examples of alkynyl groups include, but are not limited to, ethynyl, propargyl, and 3-hexynyl.

[0603] As used herein, “arylalkyl” or “aralkyl” refers to an alkyl moiety in which an alkyl hydrogen atom is replaced by an aryl group. Aralkyl includes groups in which more than one hydrogen atom has been replaced by an aryl group. Examples of “arylalkyl” or “aralkyl” include benzyl, 2-phenylethyl, 3-phenylpropyl, 9-fluorenyl, benzhydryl, and trityl groups.

[0604] As used herein, “cycloalkyl” refers to a cyclic, bicyclic, tricyclic, or polycyclic non-aromatic hydrocarbon groups having 3 to 12 carbons. Examples of cycloalkyl moieties include, but are not limited to, cyclopropyl, cyclopentyl, and cyclohexyl.

[0605] As used herein, “heterocyclyl” refers to a monovalent radical of a heterocyclic ring system. Representative heterocyclyls include, without limitation, tetrahydrofuranyl, tetrahydrothienyl, pyrrolidinyl, pyrrolidonyl, piperidinyl, pyrrolinyl, piperazinyl, dioxanyl, dioxolanyl, diazepinyl, oxazepinyl, thiazepinyl, and morpholinyl.

[0606] As used herein, “heteroaryl” refers to a monovalent radical of a heteroaromatic ring system. Examples of heteroaryl moieties include, but are not limited to, imidazolyl, oxazolyl, thiazolyl, triazolyl, pyrrolyl, furanyl, indolyl, thiophenyl pyrazolyl, pyridinyl, pyrazinyl, pyridazinyl, pyrimidinyl, indolizinyl, purinyl, naphthyridinyl, quinolyl, and pteridinyl.

### Phosphate Backbone Modifications

### The Phosphate Group

[0607] In some embodiments, the phosphate group of a modified nucleotide can be modified by replacing one or more of the oxygens with a different substituent. Further, the modified nucleotide, e.g., modified nucleotide present in a modified nucleic acid, can include the wholesale replacement of an unmodified phosphate moiety with a modified phosphate as described herein. In some embodiments, the modification of the phosphate backbone can include alterations that result in either an uncharged linker or a charged linker with unsymmetrical charge distribution.

[0608] Examples of modified phosphate groups include, phosphorothioate, phosphoroselenates, borano phosphates, borano phosphate esters, hydrogen phosphonates, phosphoroamidates, alkyl or aryl phosphonates and phosphotriesters. In some embodiments, one of the non-bridging phosphate oxygen atoms in the phosphate backbone moiety can be replaced by any of the following groups: sulfur (S), selenium (Se), BR₃ (wherein R can be, e.g., hydrogen, alkyl, or aryl), C (e.g., an alkyl group, an aryl group, and the like), H, NR₂ (wherein R can be, e.g., hydrogen, alkyl, or aryl), or OR (wherein R can be, e.g., alkyl or aryl). The phosphorous atom in an unmodified phosphate group is achiral. However, replacement of one of the non-bridging oxygens with one of the above atoms or groups of atoms can render the phosphorous atom chiral; that is to say that a phosphorous atom in a phosphate group modified in this way is a stereogenic center. The stereogenic phosphorous atom can possess either the “R” configuration (herein Rp) or the “S” configuration (herein Sp).

[0609] Phosphorodithioates have both non-bridging oxygens replaced by sulfur. The phosphorus center in the phosphorodithioates is achiral which precludes the formation of oligoribonucleotide diastereomers. In some embodiments, modifications to one or both non-bridging oxygens can also include the replacement of the non-bridging oxygens with a group independently selected from S, Se, B, C, H, N, and OR (R can be, e.g., alkyl or aryl).

[0610] The phosphate linker can also be modified by replacement of a bridging oxygen, (i.e., the oxygen that links the phosphate to the nucleoside), with nitrogen (bridged phosphoroamidates), sulfur (bridged phosphorothioates) and carbon (bridged methylenephosphonates). The replacement can occur at either linking oxygen or at both of the linking oxygens.

### Replacement of the Phosphate Group

[0611] The phosphate group can be replaced by non-phosphorus containing connectors. In some embodiments, the charge phosphate group can be replaced by a neutral moiety.

[0612] Examples of moieties which can replace the phosphate group can include, without limitation, e.g., methyl phosphonate, hydroxylamino, siloxane, carbonate, carboxymethyl, carbamate, amide, thioether, ethylene oxide linker, sulfonate, sulfonamide, thioformacetal, formacetal, oxime, methyleneimino, methylenemethylimino, methylenehydrazo, methylenedimethylhydrazo and methyleneoxymethylimino.

### Replacement of the Ribophosphate Backbone

[0613] Scaffolds that can mimic nucleic acids can also be constructed wherein the phosphate linker and ribose sugar are replaced by nuclease resistant nucleoside or nucleotide surrogates. In some embodiments, the nucleobases can be tethered by a surrogate backbone. Examples can include, without limitation, the morpholino, cyclobutyl, pyrrolidine and peptide nucleic acid (PNA) nucleoside surrogates.

### Sugar Modifications

[0614] The modified nucleosides and modified nucleotides can include one or more modifications to the sugar group. For example, the 2′ hydroxyl group (OH) can be modified or replaced with a number of different “oxy” or “deoxy” substituents. In some embodiments, modifications to the 2′ hydroxyl group can enhance the stability of the nucleic acid since the hydroxyl can no longer be deprotonated to form a 2′-alkoxide ion. The 2′-alkoxide can catalyze degradation by intramolecular nucleophilic attack on the linker phosphorus atom.

[0615] Examples of “oxy”-2′ hydroxyl group modifications can include alkoxy or aryloxy (OR, wherein “R” can be, e.g., alkyl, cycloalkyl, aryl, aralkyl, heteroaryl or a sugar); polyethyleneglycols (PEG), O(CH₂CH₂O)ₙCH₂CH₂OR wherein R can be, e.g., H or optionally substituted alkyl, and n can be an integer from 0 to 20 (e.g., from 0 to 4, from 0 to 8, from 0 to 10, from 0 to 16, from 1 to 4, from 1 to 8, from 1 to 10, from 1 to 16, from 1 to 20, from 2 to 4, from 2 to 8, from 2 to 10, from 2 to 16, from 2 to 20, from 4 to 8, from 4 to 10, from 4 to 16, and from 4 to 20). In some embodiments, the “oxy”-2′ hydroxyl group modification can include “locked” nucleic acids (LNA) in which the 2′ hydroxyl can be connected, e.g., by a Ci-₆ alkylene or Cj-6 heteroalkylene bridge, to the 4′ carbon of the same ribose sugar, where exemplary bridges can include methylene, propylene, ether, or amino bridges; O-amino (wherein amino can be, e.g., NH₂; alkylamino, dialkylamino, heterocyclyl, arylamino, diarylamino, heteroarylamino, or diheteroarylamino, ethylenediamine, or polyamino) and aminoalkoxy, O(CH₂)˜-amino, (wherein amino can be, e.g., NH₂; alkylamino, dialkylamino, heterocyclyl, arylamino, diarylamino, heteroarylamino, or diheteroarylamino, ethylenediamine, or polyamino). In some embodiments, the “oxy”-2′ hydroxyl group modification can include the methoxyethyl group (MOE), (OCH₂CH₂OCH₃, e.g., a PEG derivative).

[0616] “Deoxy” modifications can include hydrogen (i.e. deoxyribose sugars, e.g., at the overhang portions of partially ds RNA); halo (e.g., bromo, chloro, fluoro, or iodo); amino (wherein amino can be, e.g., NH₂; alkylamino, dialkylamino, heterocyclyl, arylamino, diarylamino, heteroarylamino, diheteroarylamino, or amino acid); NH(CH₂CH₂NH)ₙCH₂CH₂— amino (wherein amino can be, e.g., as described herein), —NHC(O)R (wherein R can be, e.g., alkyl, cycloalkyl, aryl, aralkyl, heteroaryl or sugar), cyano; mercapto; alkyl-thio-alkyl; thioalkoxy; and alkyl, cycloalkyl, aryl, alkenyl and alkynyl, which may be optionally substituted with e.g., an amino as described herein.

[0617] The sugar group can also contain one or more carbons that possess the opposite stereochemical configuration than that of the corresponding carbon in ribose. Thus, a modified nucleic acid can include nucleotides containing e.g., arabinose, as the sugar. The nucleotide “monomer” can have an alpha linkage at the Γ position on the sugar, e.g., alpha-nucleosides. The modified nucleic acids can also include “abasic” sugars, which lack a nucleobase at C−. These abasic sugars can also be further modified at one or more of the constituent sugar atoms. The modified nucleic acids can also include one or more sugars that are in the L form, e.g. L-nucleosides.

[0618] Generally, RNA includes the sugar group ribose, which is a 5-membered ring having an oxygen. Exemplary modified nucleosides and modified nucleotides can include, without limitation, replacement of the oxygen in ribose (e.g., with sulfur (S), selenium (Se), or alkylene, such as, e.g., methylene or ethylene); addition of a double bond (e.g., to replace ribose with cyclopentenyl or cyclohexenyl); ring contraction of ribose (e.g., to form a 4-membered ring of cyclobutane or oxetane); ring expansion of ribose (e.g., to form a 6- or 7-membered ring having an additional carbon or heteroatom, such as for example, anhydrohexitol, altritol, mannitol, cyclohexanyl, cyclohexenyl, and morpholino that also has a phosphoramidate backbone). In some embodiments, the modified nucleotides can include multicyclic forms (e.g., tricyclo; and “unlocked” forms, such as glycol nucleic acid (GNA) (e.g., R-GNA or S-GNA, where ribose is replaced by glycol units attached to phosphodiester bonds), threose nucleic acid (TNA, where ribose is replaced with a-L-threofuranosyl-(3′↔2′)).

### Modifications on the Nucleobase

[0619] The modified nucleosides and modified nucleotides described herein, which can be incorporated into a modified nucleic acid, can include a modified nucleobase. Examples of nucleobases include, but are not limited to, adenine (A), guanine (G), cytosine (C), and uracil (U). These nucleobases can be modified or wholly replaced to provide modified nucleosides and modified nucleotides that can be incorporated into modified nucleic acids. The nucleobase of the nucleotide can be independently selected from a purine, a pyrimidine, a purine or pyrimidine analog. In some embodiments, the nucleobase can include, for example, naturally-occurring and synthetic derivatives of a base.

### Uracil

[0620] In some embodiments, the modified nucleobase is a modified uracil. Exemplary nucleobases and nucleosides having a modified uracil include without limitation pseudouridine (Ψ), pyridin-4-one ribonucleoside, 5-aza-uridine, 6-aza-uridine, 2-thio-5-aza-uridine, 2-thio-uridine (s2U), 4-thio-uridine (s4U), 4-thio-pseudouridine, 2-thio-pseudouridine, 5-hydroxy-u,ridine (ho⁵U), 5-aminoallyl-uridine, 5-halo-uridine (e.g., 5-iodo-uridine or 5-bromo-uridine), 3-methyl-uridine (m³U), 5-methoxy-uridine (mo⁵U), uridine 5-oxyacetic acid (cmosU), uridine 5-oxyacetic acid methyl ester (mcmo\hat{ }U), 5-carboxymethyl-uridine (cmSU), 1-carboxymethyl-pseudouridine, 5-carboxyhydroxymethyl-uridine (chm⁵U), 5-carboxyhydroxymethyl-uridine methyl ester (mchm⁵U), 5-methoxycarbonylmethyl-uridine (mcm⁵U), 5-methoxycarbonylmethyl-2-thio-uridine (mcm⁵s2U), 5-aminomethyl-2-thio-uridine (nm⁵s2U), 5-methylaminomethyl-uridine (mnmU), 5-methylaminomethyl-2-thio-uridine (mnm⁵s2U), 5-methylaminomethyl-2-seleno-uridine (mnmnse²U), 5-carbamoylmethyl-uridine (ncmsU), 5-carboxymethylaminomethyl-uridine (cmnm⁵U), 5-carboxymethylaminomethyl-2-thio-uridine (cmnm s2U), 5-propynyl-uridine, 1-propynyl-pseudouridine, 5-taurinomethyl-uridine (xcmU), 1-taurinomethyl-pseudouridine, 5-taurinomethyl-2-thio-uridine(Trn⁵2U), 1-taurinomethyl-4-thio-pseudouridine, 5-methyl-uridine (m⁵U, i.e., having the nucleobase deoxythymine), 1-methyl-pseudouridine (ιτι′Ψ). 5-methyl-2-thio-uridine (m⁵s2U), 1-methyl-4-thio-pseudouridine (m′s \|/), 4-thio-1-methyl-pseudouridine, 3-methyl-pseudouridine (m′V), 2-thio-1-methyl-pseudouridine, 1-methyl-1-deaza-pseudouridine, 2-thio-1-methyl-1-deaza-pseudouridine, dihydroundine (D), dihydropseudoundine, 5,6-dihydrouridine, 5-methyl-dihydrouridine (m⁵D), 2-thio-dihydrouridine, 2-thio-dihydropseudouridine, 2-methoxy-uridine, 2-methoxy-4-thio-uridine, 4-methoxy-pseudouridine, 4-methoxy-2-thio-pseudouridine, N 1-methyl-pseudouridine, 3-(3-amino-3-carboxypropyl)uridine (acp³U), 1-methyl-3-(3-amino-3-carboxypropy pseudouridine 5-(isopentenylaminomethyl)uridine (inmU), 5-(isopentenylaminomethy])-2-thio-uridine (inm⁵s2U), a-thio-uridine, 2-O-methyl-uridine (Urn), 5,2-O-dimethyl-uridine (m⁵Um), 2-O-methyl-pseudouridine (105 πι), 2-thio-2′-O-methyl-uridine (s2Um), 5-methoxycarbonylmethyl-2′-O-methyl-uridine (mcm⁵Um), 5-carbamoylmethyl-2′-O-methyl-uridine (ncm⁵Um), 5-carboxymethylaminomethyl-2′-O-methyl-uridine (cmnm⁵Um), 3,2′-O-dimethyl-uridine (m³Um), 5-(isopentenylaminomethyl)-2′-O-methyl-uridine (inm⁵Um), 1-thio-uridine, deoxythymidine, 2′-F-ara-uridine, 2′-F-uridine, 2′-OH-ara-uridine, 5-(2-carbomethoxyvinyl) uridine, 5-[3-(1-E-propenylamino)uridine, pyrazolo[3,4-d]pyrimidines, xanthine, and hypoxanthine.

### Cytosine

[0621] In some embodiments, the modified nucleobase is a modified cytosine. Exemplary nucleobases and nucleosides having a modified cytosine include without limitation 5-aza-cytidine, 6-aza-cytidine, pseudoisocytidine, 3-methyl-cytidine (m³C), N4-acetyl-cytidine (act), 5-formyl-cytidine (f⁵C), N4-methyl-cytidine (m⁴C), 5-methyl-cytidine (m⁵C), 5-halo-cytidine (e.g., 5-iodo-cytidine), 5-hydroxymethyl-cytidine (hm⁵C), 1-methyl-pseudoisocytidine, pyrrolo-cytidine, pyrrolo-pseudoisocytidine, 2-thio-cytidine (s2C), 2-thio-5-methyl-cytidine, 4-thio-pseudoisocytidine, 4-thio-1-methyl-pseudoisocytidine, 4-thio-1-methyl-1-deaza-pseudoisocytidine, 1-methyl-1-deaza-pseudoisocytidine, zebularine, 5-aza-zebularine, 5-methyl-zebularine, 5-aza-2-thio-zebularine, 2-thio-zebularine, 2-methoxy-cytidine, 2-methoxy-5-methyl-cytidine, 4-methoxy-pseudoisocytidine, 4-methoxy-1-methyl-pseudoisocytidine, lysidine (k²C), a-thio-cytidine, 2′-O-methyl-cytidine (Cm), 5,2′-0-dimethyl-cytidine (m⁵Cm), N4-acetyl-2′-O-methyl-cytidine (ac⁴Cm), N4,2′-O-dimethyl-cytidine (m⁴Cm), 5-formyl-2′-O-methyl-cytidine (f⁵Cm), N4,N4,2′-O-trimethyl-cytidine (m⁴₂Cm), 1-thio-cytidine, 2′-F-ara-cytidine, 2′-F-cytidine, and 2′-OH-ara-cytidine.

### Adenine

[0622] In some embodiments, the modified nucleobase is a modified adenine. Exemplary nucleobases and nucleosides having a modified adenine include without limitation 2-amino-purine, 2,6-diaminopurine, 2-amino-6-halo-purine (e.g., 2-amino-6-chloro-purine), 6-halo-purine (e.g., 6-chloi-purine), 2-amino-6-methyl-purine, 8-azido-adenosine, 7-deaza-adenine, 7-deaza-8-aza-adenine, 7-deaza-2-amino-purine, 7-deaza-8-aza-2-amino-purine, 7-deaza-2,6-diaminopurine, 7-deaza-8-aza-2,6-diaminopurine, 1-methyl-adenosine (m′A), 2-methyl-adenine (m A), N6-methyl-adenosine (m⁶A), 2-methylthio-N6-methyl-adenosine (ms² m⁶A), N6-isopentenyl-adenosine (i⁶A), 2-methylthio-N6-isopentenyl-adenosine (ms²io⁶A), N6-(cis-hydroxyisopentenyl)adenos′ine (io⁶A), 2-methylthio-N6-(cis-hydroxyisopentenyl)adenosine (ms2io⁶A), N6-glycinylcarbamoyl-adenosine (g⁶A), N6-threonylcarbamoyl-adenosine (t⁶A), N6-methyl-N6-threonylcarbamoyl-adenosine (m⁶t6A), 2-methylthio-N6-threonylcarbamoyl-adenosine (ms²g⁶A), N6,N6-dimethyl-adenosine (m⁶₂A), N6-hydroxynorvalylcarbamoyl-adenosine (hn⁶A), 2-methylthio-N6-hydroxynorvalylcarbamoyl-adenosine (ms2hn⁶A), N6-acetyl-adenosine (ac⁶A), 7-methyl-adenine, 2-methylthio-adenine, 2-methoxy-adenine, a-thio-adenosine, 2′-O-methyl-adenosine (Am), N⁶,2′-O-dimethyl-adenosine (m⁵Am), N⁶-Methyl-2′-deoxyadenosine, N6,N6,2′-0-trimethyl-adenosine (m⁶₂Am), 1,2′-O-dimethyl-adenosine (m′Am), 2′-0-ribosyladenosine (phosphate) (Ar(p)), 2-amino-N6-methyl-purine, 1-thio-adenosine, 8-azido-adenosine, 2′-F-ara-adenosine, 2′-F-adenosine, 2′-OH-ara-adenosine, and N6-(19-amino-pentaoxanonadecyl)-adenosine.

### Guanine

[0623] In some embodiments, the modified nucleobase is a modified guanine. Exemplary nucleobases and nucleosides having a modified guanine include without limitation inosine (I), 1-methyl-inosine (m ′l), wyosine (imG), methylwyosine (mimG), 4-demethyl-wyo″sine (imG-14), isowyosine (imG2), wybutosine (yW), peroxywybutosine (O₂yW), hydroxywybutosine (OHyW), undemriodified hydroxywybutosine (OHyW*), 7-deaza-guanosine, queuosine (Q), epoxyqueuosine (oQ), galactosyl-queuosine (galQ), mannosyl-queuosine (manQ), 7-cyano-7-deaza-guanosine (preQo), 7-aminomethyI-7-deaza-guanosine (preQi), archaeosine (G⁺), 7-deaza-8-aza-guanosine, 6-thio-guanosine, 6-thio-7-deaza-guanosine, 6-thio-7-deaza-8-aza-guanosine, 7-methyl-guanosine (m⁷G), 6-thio-7-methyl-guanosine, 7-methyl-inosine, 6-methoxy-guanosine, 1-methyl-guanosine (m′G), N2-methyl-guanosine (m²G), N2,N2-dimethyl-guanosine (m²₂G), N2,7-dimethyl-guanosine (m²,7G), N2, N2,7-dimethyl-guanosine (m²,2,7G), 8-oxo-guanosine, 7-methyl-8-oxo-guanosine, 1-meth thio-guanosine, N2-methyl-6-thio-guanosine, N2,N2-dimethyl-6-thio-guanosine, a-thio-guanosine, 2′-O-methyl-guanosine (Gm), N2-methyl-2′-O-methyl-guanosine (m¾m), N2,N2-dimethyl-2′-O-methyl-guanosine (m²₂Gm), 1-methyl-2′-O-methyl-guanosine (m′Gm), N2,7-dimethyl-2′-O-methyl-guanosine (m²,7Gm), 2′-O-methyl-inosine (Im), 1,2′-O-dimethyl-inosine (m′lm), O⁶-phenyl-2′-deoxyinosine, 2′-0-ribosylguanosine (phosphate) (Gr(p)), 1-thio-guanosine, O⁶-methy]-guanosine, O⁶-Methyl-2′-deoxyguanosine, 2′-F-ara-guanosine, and 2′-F-guanosine.

Modified gRNAs

[0624] In some embodiments, the modified nucleic acids can be modified gRNAs. In some embodiments, gRNAs can be modified at the 3′ end. In this embodiment, the gRNAs can be modified at the 3′ terminal U ribose. For example, the two terminal hydroxyl groups of the U ribose can be oxidized to aldehyde groups and a concomitant opening of the ribose ring to afford a modified nucleoside, wherein U can be an unmodified or modified uridine.

[0625] In another embodiment, the 3′ terminal U can be modified with a 2′ 3′ cyclic phosphate, wherein U can be an unmodified or modified uridine. In some embodiments, the gRNA molecules may contain 3′ nucleotides which can be stabilized against degradation, e.g., by incorporating one or more of the modified nucleotides described herein. In this embodiment, e.g., uridines can be replaced with modified uridines, e.g., 5-(2-amino)propyl uridine, and 5-bromo uridine, or with any of the modified uridines described herein; adenosines and guanosines can be replaced with modified adenosines and guanosines, e.g., with modifications at the 8-position, e.g., 8-bromo guanosine, or with any of the modified adenosines or guanosines described herein. In some embodiments, deaza nucleotides, e.g., 7-deaza-adenosine, can be incorporated into the gRNA. In some embodiments, O- and N-alkylated nucleotides, e.g., N6-methyl adenosine, can be incorporated into the gRNA. In some embodiments, sugar-modified ribonucleotides can be incorporated, e.g., wherein the 2′ OH— group is replaced by a group selected from H, —OR, —R (wherein R can be, e.g., methyl, alkyl, cycloalkyl, aryl, aralkyl, heteroaryl or sugar), halo, —SH, —SR (wherein R can be, e.g., alkyl, cycloalkyl, aryl, aralkyl, heteroaryl or sugar), amino (wherein amino can be, e.g., NH₂; alkylamino, dialkylamino, heterocyclyl, arylamino, diarylamino, heteroarylamino, diheteroarylamino, or amino acid); or cyano (—CN). In some embodiments, the phosphate backbone can be modified as described herein, e.g., with a phosphothioate group. In some embodiments, the nucleotides in the overhang region of the gRNA can each independently be a modified or unmodified nucleotide including, but not limited to 2′-sugar modified, such as, 2-F 2′-0-methyl, thymidine (T), 2′-O-methoxyethyl-5-methyluridine (Teo), 2′-O-methoxyethyladenosine (Aeo), 2′-O-methoxyethyl-5-methylcytidine (m5Ceo), and any combinations thereof.

[0626] In an embodiment, one or more or all of the nucleotides in single stranded overhang of an RNA molecule, e.g., a gRNA molecule, are deoxynucleotides.

### XIV. Pharmaceutical Compositions

[0627] Pharmaceutical compositions of the present invention may comprise a gRNA molecule described herein, e.g., a plurality of gRNA molecules as described herein, or a cell (e.g., a population of cells, e.g., a population of hematopoietic stem cells, e.g., of CD34+ cells) comprising one or more cells modified with one or more gRNA molecules described herein, in combination with one or more pharmaceutically or physiologically acceptable carriers, diluents or excipients. Such compositions may comprise buffers such as neutral buffered saline, phosphate buffered saline and the like; carbohydrates such as glucose, mannose, sucrose or dextrans, mannitol; proteins; polypeptides or amino acids such as glycine; antioxidants; chelating agents such as EDTA or glutathione; adjuvants (e.g., aluminium hydroxide); and preservatives. Compositions of the present invention are in one aspect formulated for intravenous administration.

[0628] Pharmaceutical compositions of the present invention may be administered in a manner appropriate to the disease to be treated (or prevented). The quantity and frequency of administration will be determined by such factors as the condition of the patient, and the type and severity of the patient's disease, although appropriate dosages may be determined by clinical trials.

[0629] In one embodiment, the pharmaceutical composition is substantially free of, e.g., there are no detectable levels of a contaminant, e.g., selected from the group consisting of endotoxin, mycoplasma, mouse antibodies, pooled human serum, bovine serum albumin, bovine serum, culture media components, unwanted CRISPR system components, a bacterium and a fungus. In one embodiment, the bacterium is at least one selected from the group consisting of Alcaligenes faecalis, Candida albicans, Escherichia coli, Haemophilus influenza, Neisseria meningitides, Pseudomonas aeruginosa, Staphylococcus aureus, Streptococcus pneumonia, and Streptococcus pyogenes group A.

[0630] The administration of the subject compositions may be carried out in any convenient manner, including by aerosol inhalation, injection, ingestion, transfusion, implantation or transplantation. The compositions described herein may be administered to a patient transarterially, subcutaneously, intradermally, intratumorally, intranodally, intramedullary, intramuscularly, by intravenous (i.v.) injection, or intraperitoneally. In one aspect, the compositions of the present invention are administered to a patient by intradermal or subcutaneous injection. In one aspect, the cell compositions of the present invention are administered by i.v. injection.

[0631] The dosage of the above treatments to be administered to a patient will vary with the precise nature of the conditionbeing treated and the recipient of the treatment. The scaling of dosages for human administration can be performed according to art-accepted practices.

### XV. Cells

[0632] The invention also relates to cells comprising a gRNA molecule of the invention, or nucleic acid encoding said gRNA molecules.

[0633] In an aspect the cells are cells made by a process described herein.

[0634] In embodiments, the cells are hematopoietic stem cells (e.g., hematopoietic stem and progenitor cells; HSPCs), for example, CD34+ stem cells. In embodiments, the cells are CD34+/CD90+ stem cells. In embodiments, the cells are CD34+/CD90− stem cells. In embodiments, the cells are human hematopoietic stem cells. In embodiments, the cells are autologous. In embodiments, the cells are allogeneic.

[0635] In embodiments, the cells are derived from bone marrow, e.g., autologous bone marrow. In embodiments, the cells are derived from peripheral blood, e.g., mobilized peripheral blood, e.g., autologous mobilized peripheral blood. In embodiments employing mobilized peripheral blood, the cells are isolated from patients who have been administered a mobilization agent. In embodiments, the mobilization agent is G-CSF. In embodiments, the mobilization agent is Plerixafor® (AIMD3100). In embodiments, the mobilization agent comprises a combination of G-CSF and Plerixafor® (AMD3100)). In embodiments, the cells are derived from umbilical cord blood, e.g., allogeneic umbilical cord blood. In embodiments, the cells are derived from a hemoglobinopathy patient, for example a patient with sickle cell disease or a patient with a thalassemia, e.g., beta-thalassemia.

[0636] In embodiments, the cells are mammalian. In embodiments, the cells are human. In embodiments, the cells are derived from a hemoglobinopathy patient, for example a patient with sickle cell disease or a patient with a thalassemia, e.g., beta-thalassemia.

[0637] In an aspect, the invention provides a cell comprising a modification or alteration, e.g., an indel, at or near (e.g., within 20, 19, 18, 17, 16, 15, 14, 13, 12, 11, 10, 9, 8, 7, 6, 5, 4, 3, 2 or 1 nucleotides of) a nucleic acid sequence having complementarity to a gRNA molecule or gRNA molecules, e.g., as described herein, introduced into said cells, e.g., as part of a CRISPR system as described herein. In embodiments, the cell is a CD34+ cell. In embodiments, the altered or modified cell, e.g., CD34+ cell, maintains the ability to differentiate into cells of multiple lineages, e.g., maintains the ability to differentiate into cells of the erythroid lineage. In embodiments, the altered or modified cell, e.g., CD34+ cell, has undergone or is able to undergo at least 2, at least 3, at least 4, at least 5, at least 6, at least 7, at least 8, at least 9 or at least 10 or more doublings in culture, e.g., in culture comprising a stem cell expander, e.g., (S)-2-(6-(2-(1H-indol-3-yl)ethylamino)-2-(5-fluoropyridin-3-yl)-9H-purin-9-yl)propan-1-ol. In embodiments, the altered or modified cell, e.g., CD34+ cell, has undergone or is able to undergo at least 5, e.g., about 5, doublings in culture, e.g., in culture comprising a stem cell expander molecule, e.g., as described herein, e.g., (S)-2-(6-(2-(1H-indol-3-yl)ethylamino)-2-(5-fluoropyridin-3-yl)-9H-purin-9-yl)propan-1-ol. In embodiments the altered or modified cell, e.g., CD34+ cell, exhibits and/or is able to differentiate into a cell, e.g., into a cell of the erythroid lineage, e.g., into a red blood cell, that exhibits increased fetal hemoglobin level (e.g., expression level and/or protein level), e.g., at least a 20% increase in fetal hemoglobin protein level, relative to a similar unmodified or unaltered cell. In embodiments the altered or modified cell, e.g., CD34+ cell, exhibits and/or is able to differentiate into a cell, e.g., into a cell of the erythroid lineage, e.g., into a red blood cell, that exhibits increased fetal hemoglobin level (e.g., expression level and/or protein level), relative to a similar unmodified or unaltered cell, e.g., produces at least 6 picograms, e.g., at least 7 picograms, at least 8 picograms, at least 9 picograms, or at least 10 picograms of fetal hemoglobin. In embodiments the altered or modified cell, e.g., CD34+ cell, exhibits and/or is able to differentiate into a cell, e.g., into a cell of the erythroid lineage, e.g., into a red blood cell, that exhibits increased fetal hemoglobin level (e.g., expression level and/or protein level), relative to a similar unmodified or unaltered cell, e.g., produces about 6 to about 12, about 6 to about 7, about 7 to about 8, about 8 to about 9, about 9 to about 10, about 10 to about 11 or about 11 to about 12 picograms of fetal hemoglobin.

[0638] In an aspect, the invention provides a population of cells comprising cells having a modification or alteration, e.g., an indel, at or near (e.g., within 20, 19, 18, 17, 16, 15, 14, 13, 12, 11, 10, 9, 8, 7, 6, 5, 4, 3, 2 or 1 nucleotides of) a nucleic acid sequence having complementarity to a gRNA molecule or gRNA molecules, e.g., as described herein, introduced into said cells, e.g., as part of a CRISPR system as described herein. In embodiments, at least 50%, e.g., at least 60%, at least 70%, at least 80% or at least 90% of the cells of the population have the modification or alteration (e.g., have at least one modification or alteration), e.g., as measured by NGS, e.g., as described herein, e.g., at day two following introduction of the gRNA and/or CRISPR system of the invention. In embodiments, at least 90%, e.g., at least 91%, at least 92%, at least 93%, at least 94%, at least 95%, at least 96%, at least 97%, at least 98% or at least 99% of the cells of the population have the modification or alteration (e.g., have at least one modification or alteration), e.g., as measured by NGS, e.g., as described herein, e.g., at day two following introduction of the gRNA and/or CRISPR system of the invention. In embodiments, the population of cells comprise CD34+ cells, e.g., comprise at least about 50%, at least about 60%, at least about 70%, at least about 80%, at least about 90%, at least about 95% or at least about 98% CD34+ cells. In embodiments, the population of cells comprising the altered or modified cells, e.g., CD34+ cells, maintain the ability to produce, e.g., differentiate into, cells of multiple lineages, e.g., maintains the ability to produce, e.g., differentiate into, cells of the erythroid lineage. In embodiments, the population of cells, e.g., population of CD34+ cells, has undergone or is able to undergo at least 2, at least 3, at least 4, at least 5, at least 6, at least 7, at least 8, at least 9 or at least 10 or more population doublings in culture, e.g., in culture comprising a stem cell expander, e.g., (S)-2-(6-(2-(1H-indol-3-yl)ethylamino)-2-(5-fluoropyridin-3-yl)-9H-purin-9-yl)propan-1-ol. In embodiments, the population of altered or modified cells, e.g., population of CD34+ cells, has undergone or is capable of undergoing at least 5, e.g., about 5, population doublings in culture, e.g., in culture comprising a stem cell expander molecule, e.g., as described herein, e.g., (S)-2-(6-(2-(1H-indol-3-yl)ethylamino)-2-(5-fluoropyridin-3-yl)-9H-purin-9-yl)propan-1-ol. In embodiments the population of cells comprising altered or modified cells, e.g., CD34+ cells, exhibits and/or is able to differentiate into a population of cells, e.g., into a population of cells of the erythroid lineage, e.g., into a population of red blood cells, that exhibits increased fetal hemoglobin level (e.g., expression level and/or protein level), e.g., at least a 20% increase in fetal hemoglobin protein level, relative to a similar unmodified or unaltered cells. In embodiments the population of cells comprising altered or modified cells, e.g., CD34+ cells, exhibits and/or is able to differentiate into a population of cells, e.g., into a population of cells of the erythroid lineage, e.g., into a population of red blood cells, that exhibits increased fetal hemoglobin level (e.g., expression level and/or protein level), relative to a similar unmodified or unaltered cells, e.g., comprises cells that produce at least 6 picograms, e.g., at least 7 picograms, at least 8 picograms, at least 9 picograms, or at least 10 picograms of fetal hemoglobin per cell. In embodiments the population of altered or modified cells, e.g., CD34+ cells, exhibits and/or is able to differentiate into a population of cells, e.g., into a population of cells of the erythroid lineage, e.g., into a population of red blood cells, that exhibits increased fetal hemoglobin level (e.g., expression level and/or protein level), relative to a similar unmodified or unaltered cell, e.g., comprises cells that produce about 6 to about 12, about 6 to about 7, about 7 to about 8, about 8 to about 9, about 9 to about 10, about 10 to about 11 or about 11 to about 12 picograms of fetal hemoglobin per cell.

[0639] In embodiments, the population of cells, e.g., as described herein, comprises at least about 1e3 cells. In embodiments, the population of cells, e.g., as described herein, comprises at least about 1e4 cells. In embodiments, the population of cells, e.g., as described herein, comprises at least about 1e5 cells. In embodiments, the population of cells, e.g., as described herein, comprises at least about 1e6 cells. In embodiments, the population of cells, e.g., as described herein, comprises at least about 1e7 cells. In embodiments, the population of cells, e.g., as described herein, comprises at least about 1e8 cells. In embodiments, the population of cells, e.g., as described herein, comprises at least about 1e9 cells. In embodiments, the population of cells, e.g., as described herein, comprises at least about 1e10 cells. In embodiments, the population of cells, e.g., as described herein, comprises at least about 1e11 cells. In embodiments, the population of cells, e.g., as described herein, comprises at least about 1e12 cells. In embodiments, the population of cells, e.g., as described herein, comprises at least about 1e13 cells per kilogram body weight of the patient to which they are to be administered. In embodiments, the population of cells, e.g., as described herein, comprises at least about 1e6 cells per kilogram body weight of the patient to which they are to be administered. In embodiments, the population of cells, e.g., as described herein, comprises at least about 2e6 cells per kilogram body weight of the patient to which they are to be administered. In embodiments, the population of cells, e.g., as described herein, comprises at least about 3e6 cells per kilogram body weight of the patient to which they are to be administered. In embodiments, the population of cells, e.g., as described herein, comprises at least about 4e6 cells per kilogram body weight of the patient to which they are to be administered. In embodiments, the population of cells, e.g., as described herein, comprises at least about 5e6 cells per kilogram body weight of the patient to which they are to be administered. In embodiments, the population of cells, e.g., as described herein, comprises at least about 6e6 cells per kilogram body weight of the patient to which they are to be administered. In embodiments, the population of cells, e.g., as described herein, comprises at least about 7e6 cells per kilogram body weight of the patient to which they are to be administered. In embodiments, the population of cells, e.g., as described herein, comprises at least about 8e6 cells per kilogram body weight of the patient to which they are to be administered. In embodiments, the population of cells, e.g., as described herein, comprises at least about 9e6 cells per kilogram body weight of the patient to which they are to be administered. In embodiments, the population of cells, e.g., as described herein, comprises at least about 1e7 cells per kilogram body weight of the patient to which they are to be administered. In embodiments, the population of cells, e.g., as described herein, comprises at least about 2e7 cells per kilogram body weight of the patient to which they are to be administered. In embodiments, the population of cells, e.g., as described herein, comprises at least about 3e7 cells per kilogram body weight of the patient to which they are to be administered. In embodiments, the population of cells, e.g., as described herein, comprises at least about 4e7 cells per kilogram body weight of the patient to which they are to be administered. In embodiments, the population of cells, e.g., as described herein, comprises at least about 5e7 cells per kilogram body weight of the patient to which they are to be administered. In embodiments, the population of cells, e.g., as described herein, comprises at least about 6e7 cells per kilogram body weight of the patient to which they are to be administered. In embodiments, the population of cells, e.g., as described herein, comprises at least about 7e7 cells per kilogram body weight of the patient to which they are to be administered. In embodiments, the population of cells, e.g., as described herein, comprises at least about 8e7 cells per kilogram body weight of the patient to which they are to be administered. In embodiments, the population of cells, e.g., as described herein, comprises at least about 9e7 cells per kilogram body weight of the patient to which they are to be administered. In embodiments, the population of cells, e.g., as described herein, comprises at least about 1e8 cells per kilogram body weight of the patient to which they are to be administered. In any of the aforementioned embodiments, the population of cells may comprise at least about 50% (for example, at least about 60%, at least about 70%, at least about 80%, at least about 90%, at least about 95% or at least about 99%) HSPCs, e.g., CD34+ cells. In any of the aforementioned embodiments, the population of cells may comprise about 60% HSPCs, e.g., CD34+ cells. In an embodiment, the population of cells, e.g., as described herein, comprises about 3e7 cells and comprises about 2e7 HSPCs, e.g., CD34+ cells. As used throughout this application, the scientific notation [number]e[number] is given its ordinary meaning. Thus, for example, 2e6 is equivalent to 2×10⁶ or 2,000,000. In embodiments, the population of cells, e.g., as described herein, comprises at least about 1e6 HSPCs, e.g., CD34+ cells, per kilogram body weight of the patient to which they are to be administered. In embodiments, the population of cells, e.g., as described herein, comprises at least about 1.5e6 HSPCs, e.g., CD34+ cells, per kilogram body weight of the patient to which they are to be administered. In embodiments, the population of cells, e.g., as described herein, comprises at least about 2e6 HSPCs, e.g., CD34+ cells, per kilogram body weight of the patient to which they are to be administered. In embodiments, the population of cells, e.g., as described herein, comprises at least about 3e6 HSPCs, e.g., CD34+ cells, per kilogram body weight of the patient to which they are to be administered. In embodiments, the population of cells, e.g., as described herein, comprises at least about 4e6 HSPCs, e.g., CD34+ cells, per kilogram body weight of the patient to which they are to be administered. In embodiments, the population of cells, e.g., as described herein, comprises at least about 5e6 HSPCs, e.g., CD34+ cells, per kilogram body weight of the patient to which they are to be administered. In embodiments, the population of cells, e.g., as described herein, comprises at least about 6e6 HSPCs, e.g., CD34+ cells, per kilogram body weight of the patient to which they are to be administered. In embodiments, the population of cells, e.g., as described herein, comprises at least about 7e6 HSPCs, e.g., CD34+ cells, per kilogram body weight of the patient to which they are to be administered. In embodiments, the population of cells, e.g., as described herein, comprises at least about 8e6 HSPCs, e.g., CD34+ cells, per kilogram body weight of the patient to which they are to be administered. In embodiments, the population of cells, e.g., as described herein, comprises at least about 9e6 HSPCs, e.g., CD34+ cells, per kilogram body weight of the patient to which they are to be administered. In embodiments, the population of cells, e.g., as described herein, comprises at least about 1e7 HSPCs, e.g., CD34+ cells, per kilogram body weight of the patient to which they are to be administered. In embodiments, the population of cells, e.g., as described herein, comprises at least about 2e7 HSPCs, e.g., CD34+ cells, per kilogram body weight of the patient to which they are to be administered. In embodiments, the population of cells, e.g., as described herein, comprises at least about 3e7 HSPCs, e.g., CD34+ cells, per kilogram body weight of the patient to which they are to be administered. In embodiments, the population of cells, e.g., as described herein, comprises at least about 4e7 HSPCs, e.g., CD34+ cells, per kilogram body weight of the patient to which they are to be administered. In embodiments, the population of cells, e.g., as described herein, comprises at least about 5e7 HSPCs, e.g., CD34+ cells, per kilogram body weight of the patient to which they are to be administered. In embodiments, the population of cells, e.g., as described herein, comprises at least about 6e7 HSPCs, e.g., CD34+ cells, per kilogram body weight of the patient to which they are to be administered. In embodiments, the population of cells, e.g., as described herein, comprises at least about 7e7 HSPCs, e.g., CD34+ cells, per kilogram body weight of the patient to which they are to be administered. In embodiments, the population of cells, e.g., as described herein, comprises at least about 8e7 HSPCs, e.g., CD34+ cells, per kilogram body weight of the patient to which they are to be administered. In embodiments, the population of cells, e.g., as described herein, comprises at least about 9e7 HSPCs, e.g., CD34+ cells, per kilogram body weight of the patient to which they are to be administered. In embodiments, the population of cells, e.g., as described herein, comprises at least about 1e8 HSPCs, e.g., CD34+ cells, per kilogram body weight of the patient to which they are to be administered. In embodiments, the population of cells, e.g., as described herein, comprises at least about 2e8 HSPCs, e.g., CD34+ cells, per kilogram body weight of the patient to which they are to be administered. In embodiments, the population of cells, e.g., as described herein, comprises at least about 3e8 HSPCs, e.g., CD34+ cells, per kilogram body weight of the patient to which they are to be administered. In embodiments, the population of cells, e.g., as described herein, comprises at least about 4e8 HSPCs, e.g., CD34+ cells, per kilogram body weight of the patient to which they are to be administered. In embodiments, the population of cells, e.g., as described herein, comprises at least about 5e8 HSPCs, e.g., CD34+ cells, per kilogram body weight of the patient to which they are to be administered.

[0640] In embodiments, the population of cells, e.g., as described herein, comprises about 1e6 HSPCs, e.g., CD34+ cells, per kilogram body weight of the patient to which they are to be administered. In embodiments, the population of cells, e.g., as described herein, comprises about 1.5e6 HSPCs, e.g., CD34+ cells, per kilogram body weight of the patient to which they are to be administered. In embodiments, the population of cells, e.g., as described herein, comprises about 2e6 HSPCs, e.g., CD34+ cells, per kilogram body weight of the patient to which they are to be administered. In embodiments, the population of cells, e.g., as described herein, comprises about 3e6 HSPCs, e.g., CD34+ cells, per kilogram body weight of the patient to which they are to be administered. In embodiments, the population of cells, e.g., as described herein, comprises about 4e6 HSPCs, e.g., CD34+ cells, per kilogram body weight of the patient to which they are to be administered. In embodiments, the population of cells, e.g., as described herein, comprises about 5e6 HSPCs, e.g., CD34+ cells, per kilogram body weight of the patient to which they are to be administered. In embodiments, the population of cells, e.g., as described herein, comprises about 6e6 HSPCs, e.g., CD34+ cells, per kilogram body weight of the patient to which they are to be administered. In embodiments, the population of cells, e.g., as described herein, comprises about 7e6 HSPCs, e.g., CD34+ cells, per kilogram body weight of the patient to which they are to be administered. In embodiments, the population of cells, e.g., as described herein, comprises about 8e6 HSPCs, e.g., CD34+ cells, per kilogram body weight of the patient to which they are to be administered. In embodiments, the population of cells, e.g., as described herein, comprises about 9e6 HSPCs, e.g., CD34+ cells, per kilogram body weight of the patient to which they are to be administered. In embodiments, the population of cells, e.g., as described herein, comprises about 1e7 HSPCs, e.g., CD34+ cells, per kilogram body weight of the patient to which they are to be administered. In embodiments, the population of cells, e.g., as described herein, comprises about 2e7 HSPCs, e.g., CD34+ cells, per kilogram body weight of the patient to which they are to be administered. In embodiments, the population of cells, e.g., as described herein, comprises about 3e7 HSPCs, e.g., CD34+ cells, per kilogram body weight of the patient to which they are to be administered. In embodiments, the population of cells, e.g., as described herein, comprises about 4e7 HSPCs, e.g., CD34+ cells, per kilogram body weight of the patient to which they are to be administered. In embodiments, the population of cells, e.g., as described herein, comprises about 5e7 HSPCs, e.g., CD34+ cells, per kilogram body weight of the patient to which they are to be administered. In embodiments, the population of cells, e.g., as described herein, comprises about 6e7 HSPCs, e.g., CD34+ cells, per kilogram body weight of the patient to which they are to be administered. In embodiments, the population of cells, e.g., as described herein, comprises about 7e7 HSPCs, e.g., CD34+ cells, per kilogram body weight of the patient to which they are to be administered. In embodiments, the population of cells, e.g., as described herein, comprises about 8e7 HSPCs, e.g., CD34+ cells, per kilogram body weight of the patient to which they are to be administered. In embodiments, the population of cells, e.g., as described herein, comprises about 9e7 HSPCs, e.g., CD34+ cells, per kilogram body weight of the patient to which they are to be administered. In embodiments, the population of cells, e.g., as described herein, comprises about 1e8 HSPCs, e.g., CD34+ cells, per kilogram body weight of the patient to which they are to be administered. In embodiments, the population of cells, e.g., as described herein, comprises about 2e8 HSPCs, e.g., CD34+ cells, per kilogram body weight of the patient to which they are to be administered. In embodiments, the population of cells, e.g., as described herein, comprises about 3e8 HSPCs, e.g., CD34+ cells, per kilogram body weight of the patient to which they are to be administered. In embodiments, the population of cells, e.g., as described herein, comprises about 4e8 HSPCs, e.g., CD34+ cells, per kilogram body weight of the patient to which they are to be administered. In embodiments, the population of cells, e.g., as described herein, comprises about 5e8 HSPCs, e.g., CD34+ cells, per kilogram body weight of the patient to which they are to be administered.

[0641] In embodiments, the population of cells, e.g., as described herein, comprises from about 2e6 to about 10e6 HSPCs, e.g., CD34+ cells, per kilogram body weight of the patient to which they are to be administered. In embodiments, the population of cells, e.g., as described herein, comprises from 2e6 to 10e6 HSPCs, e.g., CD34+ cells, per kilogram body weight of the patient to which they are to be administered.

[0642] The cells of the invention may comprise a gRNA molecule of the present invention, or nucleic acid encoding said gRNA molecule, and a Cas9 molecule of the present invention, or nucleic acid encoding said Cas9 molecule. In an embodiment, the cells of the invention may comprise a ribonuclear protein (RNP) complex which comprises a gRNA molecule of the invention and a Cas9 molecule of the invention.

[0643] The cells of the invention are preferably modified to comprise a gRNA molecule of the invention ex vivo, for example by a method described herein, e.g., by electroporation or by TRIAMF (as described in patent application PCT/US2017/54110, incorporated herein by reference in its entirety).

[0644] The cells of the invention include cells in which expression of one or more genes has been altered, for example, reduced or inhibited, by introduction of a CRISPR system comprising a gRNA of the invention. For example, the cells of the present invention may have a reduced level of beta globin (e.g., hemoglobin beta comprising a sickling mutation) expression relative to unmodified cells. As another example, the cells of the present invention may have an increased level of fetal hemoglobin expression relative to unmodified cells. Alternatively, or in addition, a cell of the invention may give rise, e.g., differentiate into, another type of cell, e.g., an erythrocyte, that has an increased level of fetal hemoglobin expression relative to cells differentiated from unmodified cells. In embodiments, the increase in level of fetal hemoglobin is at least about 20%, at least about 30%, at least about 40% or at least about 50%. Alternatively, or in addition, a cell of the invention may give rise, e.g., differentiate into, another type of cell, e.g., an erythrocyte, that has a reduced level of beta globin (e.g., hemoglobin beta comprising a sickling mutation, also referred to herein as sickle beta globin) expression relative to cells differentiated from unmodified cells. In embodiments, the decrease in level of sickle beta-globin is at least about 20%, at least about 30%, at least about 40% or at least about 50%.

[0645] The cells of the invention include cells in which expression of one or more genes has been altered, for example, reduced or inhibited, by introduction of a CRISPR system comprising a gRNA of the invention. For example, the cells of the present invention may have a reduced level of hemoglobin beta, for example a mutated or wild-type hemoglobin beta, expression relative to unmodified cells. In another aspect, the invention provides cells which are derived from, e.g., differentiated from, cells in which a CRISPR system comprising a gRNA of the invention has been introduced. In such aspects, the cells in which the CRISPR system comprising the gRNA of the invention has been introduced may not exhibit the reduced level of hemoglobin beta, for example a mutated or wild-type hemoglobin beta, but the cells derived from, e.g., differentiated from, said cells exhibit the reduced level of hemoglobin beta, for example a mutated or wild-type hemoglobin beta. In embodiments, the derivation, e.g., differentiation, is accomplished in vivo (e.g., in a patient, e.g., in a hemoglobinopathy patient, e.g., in a patient with sickle cell disease or a thalassemia, e.g., beta thalassemia). In embodiments the cells in which the CRISPR system comprising the gRNA of the invention has been introduced are CD34+ cells and the cells derived, e.g., differentiated, therefrom are of the erythroid lineage, e.g., red blood cells.

[0646] The cells of the invention include cells in which expression of one or more genes has been altered, for example, increased or promoted, by introduction of a CRISPR system comprising a gRNA of the invention. For example, the cells of the present invention may have an increased level of fetal hemoglobin expression relative to unmodified cells. In another aspect, the invention provides cells which are derived from, e.g., differentiated from, cells in which a CRISPR system comprising a gRNA of the invention has been introduced. In such aspects, the cells in which the CRISPR system comprising the gRNA of the invention has been introduced may not exhibit the increased level of fetal hemoglobin but the cells derived from, e.g., differentiated from, said cells exhibit the increased level of fetal hemoglobin. In embodiments, the derivation, e.g., differentiation, is accomplished in vivo (e.g., in a patient, e.g., in a hemoglobinopathy patient, e.g., in a patient with sickle cell disease or a thalassemia, e.g., beta thalassemia). In embodiments the cells in which the CRISPR system comprising the gRNA of the invention has been introduced are CD34+ cells and the cells derived, e.g., differentiated, therefrom are of the erythroid lineage, e.g., red blood cells.

[0647] In another aspect, the invention relates to cells which include an indel at (e.g., within) or near (e.g., within 20, 19, 18, 17, 16, 15, 14, 13, 12, 11, 10, 9, 8, 7, 6, 5, 4, 3, 2 or 1 nucleotides of) a nucleic acid sequence having complementarity to the gRNA molecule (e.g., the target sequence of the gRNA molecule) or gRNA molecules introduced into said cells. In embodiments, the indel is a frameshift indel. In embodiments, the cell includes a large deletion, for example a deletion of 1 kb, 2 kb, 3 kb, 4 kb, 5 kb, 6 kb or more. In embodiments, the large deletion comprises nucleic acids disposed between two binding sites for the gRNA molecule or gRNA molecules introduced into said cells.

[0648] In an aspect, the invention relates to a population of cells (e.g., as described herein), e.g., a population of HSPCs, which comprises cells which include an indel at or near (e.g., within 20, 19, 18, 17, 16, 15, 14, 13, 12, 11, 10, 9, 8, 7, 6, 5, 4, 3, 2 or 1 nucleotides of) a nucleic acid sequence having complementarity to a gRNA molecule or gRNA molecules, e.g., as described herein, introduced into said cells, e.g., as described herein. In embodiments, the indel is a frameshift indel. In embodiments, the cell population includes cells which comprise a large deletion, for example a deletion of 1 kb, 2 kb, 3 kb, 4 kb, 5 kb, 6 kb or more. In embodiments, the large deletion comprises nucleic acids disposed between two binding sites for the gRNA molecule or gRNA molecules introduced into said cells. In embodiments, 20%-100% of the cells of the population include said large deletion, indel or indels. In embodiments, 30%-100% of the cells of the population include said large deletion, indel or indels. In embodiments, 40%-100% of the cells of the population include said large deletion, indel or indels. In embodiments, 50%-100% of the cells of the population include said large deletion, indel or indels. In embodiments, 60%-100% of the cells of the population include said large deletion, indel or indels. In embodiments, 70%-100% of the cells of the population include said large deletion, indel or indels. In embodiments, 80%-100% of the cells of the population include said large deletion, indel or indels. In embodiments, 90%-100% of the cells of the population include said large deletion, indel or indels. In embodiments, the population of cells retains the ability to differentiate into multiple cell types, e.g., maintains the ability to differentiate into cells of erythroid lineage, e.g., red blood cells, e.g., in a subject, e.g., a human. In embodiments, the edited cells (e.g., HSPC cells, e.g., CD34+ cell, e.g., any subpopulation of CD34+ cell, e.g., as described herein) maintain the ability (and/or do) to proliferate, e.g., in cell culture, e.g., proliferate at least 5-fold, at least 10-fold, at least 15-fold, at least 20-fold, at least 25-fold, at least 30-fold, at least 35-fold, at least 40-fold, at least 45-fold, at least 50-fold or more, e.g., after 1, 2, 3, 4, 5, 6, 7 or more days (e.g., after about 1 or about 2 days) in cell culture, e.g., in a cell culture medium described herein, e.g., a cell culture medium comprising one or more stem cell expanders, e.g., compound 4. In embodiments, the edited and differentiated cells (e.g., red blood cells) maintain the ability to proliferate, e.g., proliferate at least 5-fold, at least 10-fold, at least 15-fold, at least 20-fold, at least 25-fold, at least 30-fold, at least 35-fold, at least 40-fold, at least 45-fold, at least 50-fold or more after 7 days in erythroid differentiation medium (EDM), e.g., as described in the Examples, and/or, proliferate at least 30-fold, at least 35-fold, at least 40-fold, at least 45-fold, at least 50-fold, at least 55-fold, at least 60-fold, at least 65-fold, at least 70-fold, at least 75-fold, at least 80-fold, at least 85-fold, at least 90-fold, at least 95-fold, at least 100-fold, at least 110-fold, at least 120-fold, at least 130-fold, at least 140-fold, at least 150-fold, at least 200-fold, at least 300-fold, at least 400-fold, at least 500-fold, at least 600-fold, at least 700-fold, at least 800-fold, at least 900-fold, at least 1000-fold, at least 1100-fold, at least 1200-fold, at least 1300-fold, at least 1400-fold, at least 1500-fold or more after 21 days, e.g., in erythroid differentiation medium (EDM), e.g., as described in the Examples or in a subject (e.g., a mammal, e.g., a human).

[0649] In an embodiment, the invention provides a population of cells, e.g., CD34+ cells, of which at least 90%, e.g., at least 95%, e.g., at least 98%, of the cells of the population comprise a large deletion or one or more indels, e.g., as described herein. Without being bound by theory, it is believed that introduction of a gRNA molecule or CRISPR system as described herein into a population of cells produces a pattern of indels and/or large deletions in said population, and thus, each cell of the population which comprises an indel and/or large deletion may not exhibit the same indel and/or large deletion. In embodiments, the indel and/or large deletion comprises one or more nucleic acids at or near a site complementary to the targeting domain of a gRNA molecule described herein; wherein said cells maintain the ability to differentiate into cells of an erythroid lineage, e.g., red blood cells; and/or wherein said cells differentiated from the population of cells have an increased level of fetal hemoglobin (e.g., the population has a higher % F cells) relative to cells differentiated from a similar population of unmodified cells. In embodiments, the population of cells has undergone at least a 2-fold expansion ex vivo, e.g., in the media comprising one or more stem cell expanders, e.g., comprising (S)-2-(6-(2-(1H-indol-3-yl)ethylamino)-2-(5-fluoropyridin-3-yl)-9H-purin-9-yl)propan-1-ol. In embodiments, the population of cells has undergone at least a 5-fold expansion ex vivo, e.g., in the media comprising one or more stem cell expanders, e.g., comprising (S)-2-(6-(2-(1H-indol-3-yl)ethylamino)-2-(5-fluoropyridin-3-yl)-9H-purin-9-yl)propan-1-ol.

[0650] In embodiments, the indel is less than about 50 nucleotides, e.g., less than about 45, less than about 40, less than about 35, less than about 30 or less than about 25 nucleotides. In embodiments, the indel is less than about 25 nucleotides. In embodiments, the indel is less than about 20 nucleotides. In embodiments, the indel is less than about 15 nucleotides. In embodiments, the indel is less than about 10 nucleotides. In embodiments, the indel is less than about 9 nucleotides. In embodiments, the indel is less than about 9 nucleotides. In embodiments, the indel is less than about 7 nucleotides. In embodiments, the indel is less than about 6 nucleotides. In embodiments, the indel is less than about 5 nucleotides. In embodiments, the indel is less than about 4 nucleotides. In embodiments, the indel is less than about 3 nucleotides. In embodiments, the indel is less than about 2 nucleotides. In any of the aforementioned embodiments, the indel is at least 1 nucleotide. In embodiments, the indel is 1 nucleotide. In embodiments, the large deletion comprises about 1 kb of DNA. In embodiments, the large deletion comprises about 2 kb of DNA. In embodiments, the large deletion comprises about 3 kb of DNA. In embodiments, the large deletion comprises about 4 kb of DNA. In embodiments, the large deletion comprises about 5 kb of DNA. In embodiments, the large deletion comprises about 6 kb of DNA.

[0651] In embodiments, a population of cells (e.g., as described herein) comprises a pattern of indels and/or large deletions comprising any 1, 2, 3, 4, 5, or 6 of the most frequently detected indels associated with a CRISPR system comprising a gRNA molecule described herein. In embodiments, the indels and/or large deletions are detected by a method described herein, e.g., by NGS or qPCR.

[0652] In an aspect, the cell or population of cells (e.g., as described herein) does not comprise an indel or large deletion at an off-target site, e.g., as detected by a method described herein.

[0653] In embodiments, the progeny, e.g., differentiated progeny, e.g., erythroid (e.g., red blood cell) progeny of the cell or population of cells described herein (e.g., derived from a sickle cell disease patient) produce a lower level of sickle beta globin and/or a higher level of gamma globin than unmodified cells. In embodiments, the progeny, e.g., differentiated progeny, e.g., erythroid (e.g., red blood cell) progeny of the cell or population of cells described herein (e.g., derived from a sickle cell disease patient) produce a lower level of sickle beta globin and a higher level of gamma globin than unmodified cells. In embodiments, sickle beta globin is produced at a level at least about 20%, at least about 30%, at least about 40% or at least about 50% lower than unmodified cells. In embodiments, gamma globin is produced at a level at least about 20%, at least about 30%, at least about 40%, at least about 50%, at least about 60% or at least about 70% higher than unmodified cells.

[0654] In an aspect, the invention provides a population of modified HSPCs or erythroid cells differentiated from said HSPCs (e.g., differentiated ex vivo or in a patient), e.g., as described herein, wherein at least 15%, at least 20%, at least 25%, at least 30%, at least 35%, at least 40%, at least 45%, at least 50%, at least 55%, at least 60%, at least 65%, at least 70%, at least 75%, at least 80%, at least 85%, at least 90%, or at least 95% of the cells are F cells. In embodiments, the population of cells contains (or is capable of differentiating, e.g., in vivo, into a population of erythrocytes that contains) a higher percent of F cells than a similar population of cells which have not had a gRNA molecule or gRNA molecules, e.g., as described herein, introduced into said cells. In embodiments, the population of cells has (or is capable of differentiating, e.g., in vivo, into a population of erythrocytes that has) at least a 20% increase, e.g., at least 21% increase, at least 22% increase, at least 23% increase, at least 24% increase, at least 25% increase, at least 26% increase, at least 27% increase, at least 28% increase, or at least 29% increase, in F cells relative to the similar population of cells which have not had a gRNA molecule or gRNA molecules, e.g., as described herein, introduced into said cells. In embodiments, the population of cells has (or is capable of differentiating, e.g., in vivo, into a population of erythrocytes that has) at least a 30% increase, e.g., at least a 35% increase, at least a 40% increase, at least a 45% increase, at least a 50% increase, at least a 55% increase, at least a 60% increase, at least a 65% increase, at least a 70% increase, at least a 75% increase, at least a 80% increase, at least a 85% increase, at least a 90% increase or at least a 95% increase, in F cells relative to the similar population of cells which have not had a gRNA molecule or gRNA molecules, e.g., as described herein, introduced into said cells. In embodiments, the population of cells has (or is capable of differentiating, e.g., in vivo, into a population of erythrocytes that has) at a 10-90%, a 20%-80%, a 20%-70%, a 20%-60%, a 20%-50%, a 20%-40%, a 20%-30%, a 25%-80%, a 25%-70%, a 25%-60%, a 25%-50%, a 25%-40%, a 25%-35%, a 25%-30%, a 30%-80%, a 30%-70%, a 30%-60%, a 30%-50%, a 30%-40%, or a 30%-35% increase in F cells relative to the similar population of cells which have not had a gRNA molecule or gRNA molecules, e.g., as described herein, introduced into said cells. In embodiments, the population of cells, e.g., as produced by a method described herein, comprises a sufficient number or cells and/or a sufficient increase in % F cells to treat a hemoglobinopathy, e.g., as described herein, e.g., sickle cell disease and/or beta thalassemia, in a patient in need thereof when introduced into said patient, e.g., in a therapeutically effective amount. In embodiments, the increase in F cells is as measured in an erythroid differentiation assay, e.g., as described herein.

[0655] In embodiments, including in any of the embodiments and aspects described herein, the invention relates to a cell, e.g., a population of cells, e.g., as modified by any of the gRNA, methods and/or CRISPR systems described herein, comprising F cells that produce at least 6 picograms fetal hemoglobin per cell. In embodiments, the F cells produce at least 7 picograms fetal hemoglobin per cell. In embodiments, the F cells produce at least 8 picograms fetal hemoglobin per cell. In embodiments, the F cells produce at least 9 picograms fetal hemoglobin per cell. In embodiments, the F cells produce at least 10 picograms fetal hemoglobin per cell. In embodiments, the F cells produce an average of between 6.0 and 7.0 picograms, between 7.0 and 8.0, between 8.0 and 9.0, between 9.0 and 10.0, between 10.0 and 11.0, or between 11.0 and 12.0 picograms of fetal hemoglobin per cell.

[0656] In embodiments, a cell or population of cells, e.g., as described herein (for example, comprising an indel) (or its progeny), is detectable in the cells of a subject to which it is introduced, for example, remains detectible by detecting the indel, for example, using a method described herein. In embodiments, the cell or population of cells (or its progeny) is detectible in a subject to which it is introduced for at least 10 weeks, at least 14 weeks, at least 16 weeks, at least 18 weeks, at least 20 weeks, at least 30 weeks at least 40 weeks, at least 50 weeks, or longer after said cell or population of cells is introduced into said subject.

[0657] In embodiments, one or more indels is detectable in the cells (e.g., the cells, e.g., CD34+ cells, of the bone marrow and/or peripheral blood) of a subject to which the cells or population of cells described herein have been introduced, for example, remains detectible by a method described herein, e.g., NGS. In embodiments, the one or more indels is detectible in the cells (e.g., the cells, e.g., CD34+ cells, of the bone marrow and/or peripheral blood) of a subject to which the cells or population of cells described herein have been introduced for at least 10 weeks, at least 14 weeks, at least 16 weeks, at least 18 weeks, at least 20 weeks, at least 30 weeks at least 40 weeks, at least 50 weeks, or longer after the cell or population of cells described herein is introduced into said subject. In embodiments, the level of detection of said one or more indels does not decrease over time, or decreases by less than 5%, less than 10%, less than 15%, less than 20%, less than 30%, less than 40% or less than 50% (for example relative to the level of indel detection pre-transplant or relative to the level of detection at week 2 post-transplant or at week 8 post-transplant), for example when measured at week 20 post-transplant relative to the level of detection (e.g., percentage of cells comprising the one or more indels) measured pre-transplant or measured at week 2 post-transplant or at week 8 post-transplant.

[0658] In embodiments, including in any of the aforementioned embodiments, the cell and/or population of cells of the invention includes, e.g., consists of, cells which do not comprise nucleic acid encoding a Cas9 molecule.

### XVI. Additional ZNF644 Inhibitors and Methods of Use Thereof

[0659] As described above, a “ZNF644 inhibitor” refers to a substance that results in a detectably lower expression of ZNF644 gene or ZNF644 protein or lower activity level of ZNF644 proteins as compared to those levels without such substance. In some embodiments, a ZNF644 inhibitor is a small molecule compound (e.g., a small molecule compound that can target ZNF644 for degradation). In some embodiments, a ZNF644 inhibitor is an anti-ZNF644 shRNA. In some embodiments, a ZNF644 inhibitor is an anti-ZNF644 siRNA. In some embodiments, a ZNF644 inhibitor is an anti-ZNF644 ASO. In some embodiments, a ZNF644 inhibitor is an anti-ZNF644 AMO. In some embodiments, a ZNF644 inhibitor is an anti-ZNF644 antisense nucleic acid. In some embodiments, a ZNF644 inhibitor is a composition or a cell or a population of cells (that comprises gRNA molecules described herein) described herein.

[0660] Also provided herein are compositions that can reduce ZNF644 gene expression or ZNF644 protein activity. Such compositions include, but are not limited to, small molecule compounds (e.g., small molecule compounds that can target ZNF644 protein for degradation, e.g., through E3 ubiquitin pathway), siRNAs, shRNA, ASOs, miRNAs, AMOs. Exemplary shRNAs include those presented in Table 7.

TABLE 7

| Name | Sequence | SEQ ID NO |
|---|---|---|
| shZNF644-1 | GAAGTCACGTCACTACTTAAA | 2629 |
| shZNF644-2 | GACGAGGTTTACATTCTCCGA | 2630 |
| shZNF644-3 | CAAGGTCAAGATCTGGAAGCA | 2631 |
| shZNF644-4 | CCAGTTTGAATTGGATGTAAA | 2632 |
| shZNF644-5 | GACTGGATTAAGCACTTACAA | 2633 |

[0661] One surprising finding by the inventors of the inventions described herein is the linkage between ZNF644 gene expression/protein activity and the hemoglobin F (HbF) production. As demonstrated in the examples and figures, knocking down or knocking out ZNF644 gene in cells significantly increased HbF induction in those cells.

[0662] Also provided herein are methods for treating a hemoglobinopathy and by administering to a patient a cell or population of cells or a composition containing such cell or population of cells described herein, or a composition that reduces ZNF644 gene expression and/or ZNF644 protein activity. In aspects, the composition that reduces ZNF644 gene expression and/or ZNF644 protein activity comprises a small molecule compound (e.g., a ZNF644 degrader), siRNA, shRNA, antisense oligonucleotide (ASO), miRNA, anti-microRNA oligonucleotide (AMO) or any combination thereof. In aspects, the hemoglobinopathy is beta-thalassemia or sickle cell disease.

[0663] Also provided herein are methods for increasing fetal hemoglobin expression in a mammal by administering to a patient a cell or population of cells or a composition containing such cell or population of cells described herein, or a composition that reduces ZNF644 gene expression and/or ZNF644 protein activity. In aspects, the composition that reduces ZNF644 gene expression and/or ZNF644 protein activity comprises a small molecule compound (e.g., a ZNF644 degrader), siRNA, shRNA, antisense oligonucleotide (ASO), miRNA, anti-microRNA oligonucleotide (AMO) or any combination thereof.

[0664] Accordingly, also provided herein are methods for treating a hemoglobinopathy by administering a composition comprising a ZNF644 inhibitor as described herein to a patient. In some embodiments, a ZNF644 inhibitor is a small molecule compound that can target ZNF644 for degradation. In some embodiments, a ZNF644 inhibitor is an anti-ZNF644 shRNA. In some embodiments, a ZNF644 inhibitor is an anti-ZNF644 siRNA. In some embodiments, a ZNF644 inhibitor is an anti-ZNF644 ASO. In some embodiments, a ZNF644 inhibitor is an anti-ZNF644 miRNA. In some embodiments, a ZNF644 inhibitor is an anti-ZNF644 AMO (anti-miRNA oligonucleotides). In some embodiments, a ZNF644 inhibitor is a composition or a cell or a population of cells (that comprises gRNA molecules described herein) described herein.

[0665] Also provided herein are methods for increasing fetal hemoglobin expression in a mammal by administering a composition comprising a ZNF644 inhibitor as described herein to the mammal. In some embodiments, a ZNF644 inhibitor is a small molecule compound that can target ZNF644 for degradation. In some embodiments, a ZNF644 inhibitor is an anti-ZNF644 shRNA. In some embodiments, a ZNF644 inhibitor is an anti-ZNF644 siRNA. In some embodiments, a ZNF644 inhibitor is an anti-ZNF644 ASO. In some embodiments, a ZNF644 inhibitor is a composition or a cell or a population of cells (that comprises gRNA molecules described herein) described herein.

### Incorporation by Reference

[0666] All publications, patents, and patent applications mentioned herein are hereby incorporated by reference in their entirety as if each individual publication, patent or patent application was specifically and individually indicated to be incorporated by reference. In case of conflict, the present application, including any definitions herein, will control.

### Equivalents

[0667] Those skilled in the art will recognize, or be able to ascertain using no more than routine experimentation, many equivalents to the specific embodiments of the invention described herein. While this invention has been disclosed with reference to specific aspects, it is apparent that other aspects and variations of this invention may be devised by others skilled in the art without departing from the true spirit and scope of the invention. The appended claims are intended to be construed to include all such aspects and equivalent variations.

### EXAMPLES

### Example 1—Exemplary General Methods

### Guide Selection and Design

[0668] Initial guide selection was performed in silico using a human reference genome and user defined genomic regions of interest (e.g., a gene, an exon of a gene, non-coding regulatory region, etc.), for identifying PAMs in the regions of interest. For each identified PAM, analyses were performed and statistics reported. gRNA molecules were further selected and rank-ordered based on a number of methods for determining efficiency and efficacy, e.g., as described herein. This example provides the experimental details for procedures that can be used to assay the CRISPR systems, gRNAs and other aspects of the invention described herein. Any modifications to these general procedures that were employed in a particular experiment are noted in that example.

### Next-Generation Sequencing (NGS) and Analysis for On-Target Cleavage Efficiency and Indel Formation

[0669] To determine the efficiency of editing (e.g., cleaving) the target location in the genome, deep sequencing is utilized to identify the presence of insertions and deletions introduced by non-homologous end joining.

[0670] In summary PCR primers are designed around the target site, and the genomic area of interest are PCR amplified in edited and unedited samples. Resulting amplicons are converted into Illumina sequencing libraries and sequenced. Sequencing reads are aligned to the human genome reference and subjected to variant calling analysis allowing us to the determine sequence variants and their frequency at the target region of interest. Data are subjected to various quality filters and known variants or variants identified only in the unedited samples were excluded. The editing percentage is defined as the percentage of all insertions or deletions events occurring at the on-target site of interest (i.e. insertion and deletion reads at the on-target site over the total number of reads (wild type and mutant reads) at on-target site.

### RNP Generation

[0671] The addition of crRNA and tracrRNA to Cas9 protein results in the formation of the active Cas9 ribonucleoprotein complex (RNP), which mediates binding to the target region specified by the crRNA and specific cleavage of the targeted genomic DNA. This complex is formed by loading tracrRNA and crRNA into Cas9, which is believed to cause conformational changes to Cas9 allowing it to bind and cleave dsDNA.

[0672] The crRNA and tracrRNA are separately denatured at 95° C. for 2 minutes, and allowed to come to room temperature. Cas9 protein (10 mg/ml) was added to 5×CCE buffer (20 mM HEPES, 100 mM KCl, 5 mM MgCl₂, 1 mM DTT, 5% glycerol), to which tracrRNA and the various crRNAs are then added (in separate reactions) and incubated at 37° C. for 10 minutes, thereby forming the active RNP complex. The complex is delivered by electroporation and other methods into a wide variety of cells, including HEK-293 and CD34+ hematopoietic cells.

### Delivery of RNPs to CD34+ HSCs

[0673] Cas9 RNPs were delivered into CD34+ HSCs.

[0674] CD34+ HSCs are thawed and cultured (at ˜500,000 cells/ml) overnight in StemSpan SFEM (StemCell Technologies) media with IL6, SCF, TPO, Flt3L and Pen/Strep added. Roughly 90,000 cells were aliquoted and pelleted per each RNP delivery reaction. The cells are then resuspended in 60 ul P3 nucleofection buffer (Lonza), to which active RNP was subsequently added. The HSCs are then electroporated (e.g., nucleofected using program CA-137 on a Lonza Nucleofector) in triplicate (20 μL/electroporation). Immediately following electroporation, StemSpan SFEM media (with IL12, SCF, TPO, Flt3L and Pen/Strep) is added to the HSCs, which is cultured for at least 24 hours. HSCs are then harvested and subjected to T7E1, NGS, and/or surface marker expression analyses.

### HSC Functional Assay

[0675] CD34+ HSCs may be assayed for stem cell phenotype using known techniques such as flow cytometry or the in vitro colony forming assay. By way of example, cells are assayed by the in vitro colony forming assay (CFC) using the Methocult H4034 Optimum kit (StemCell Technologies) using the manufacturer's protocol. Briefly, 500-2000 CD34+ cells in <=100 ul volume are added to 1-1.25 ml methocult. The mixture is vortexed vigorously for 4-5 seconds to mix thoroughly, then allowed to rest at room temperature for at least 5 minutes. Using a syringe, 1-1.25 ml of MethoCult+ cells is transferred to a 35 mm dish or well of a 6-well plate. Colony number and morphology is assessed after 12-14 days as per the manufacturer's protocol.

### In Vivo Xeno-Transplantation

[0676] HSCs are functionally defined by their ability to self-renew and for multi-lineage differentiation. This functionality can only be assessed in vivo. The gold-standard for determining human HSC function is through xeno-transplantation into the NOD-SCID gamma mouse (NSG) that through a series of mutations is severely immunocompromised and thus can act as a recipient for human cells. HSCs following editing were transplanted into NSG mice to validate that the induced edit does not impact HSC function. Periodic peripheral blood analysis is used to assess human chimerism and lineage development and secondary transplantation following 20 weeks is used to establish the presence of functional HSCs, as described more fully in these examples.

### Example 2—Loss of ZNF644 Induces Fetal Hemoglobin Expression in mPB CD34+ Derived Erythroid Cells

### Materials and Methods

### Cell Culture

[0677] HEK293T cells were maintained in DMEM high glucose complete media with sodium pyrovate, non-essential amino acids, 10% FBS, 1× L-glutamine (2 mM), 1% pen/strep (100 U/ml), 1× HEPES (25 mM). Unless disclosed otherwise, all reagents for culturing HEK293T cells were obtained from Invitrogen™.

[0678] Mobilized peripheral blood (mPB) CD34+ cells (AllCells, LLC) were maintained in StemSpanT^{M} serum-free expansion media (SFEM) (STEMCELL Technologies Inc.) supplemented with 50 ng/mL each of rhTPO, rhIL-6, rhFLT3L, rhSCF for 2-3 days prior to shRNA transduction or targeted ribonucleoprotein (RNP) electroporation targeting ZNF644. All cytokines were obtained from Peprotech®, Inc. Cell cultures were maintained at 37° C. and 5% CO₂ in a humidified tissue culture incubator.

Generation of shRNA Lentiviral Clones Targeting ZNF644

[0679] 5′-phosphorylated sense and anti-sense complementary single-stranded DNA oligos of the respective shRNA against ZNF644 were synthesized by Integrated DNA Technologies, Inc. (IDT). Each DNA oligonucleotide was designed with PmeI/AscI restriction overhangs on 5′- and 3′-ends, respectively, for subsequent compatible ligation into the lentiviral vector backbone. Equimolar of each of the complementary oligonucleotides were annealed in NEB Buffer 2 (New England Biolabs® Inc.) by heating on a heating block at 98° C. for 5 minutes followed by cooling to room temperature on the bench top. Annealed double-stranded DNA oligonucleotides were ligated into pHAGE lentiviral backbone digested with PmeI/AscI using T4 DNA ligase kit (New England Biolabs). Ligation reactions were transformed into chemically competent Stb13 cells (Invitrogen™) according to the manufacturer's protocol. Positive clones were verified using mU6 sequencing primer (5′-ctacattttacatgatagg-3′) (SEQ ID NO: 3206) and plasmids were purified by Alta Biotech LLC.

[0680] Lentivirus particles for the respective shRNA constructs were generated by co-transfection of HEK293T cells with pCMV-dR8.91 and pCMV-VSV-G expressing envelope plasmid using Lipofectamine 3000 reagent in 150 mm tissue culture dish format as per manufacturer's instructions (Invitrogen™). Lentivirus supernatant was harvested 48 hours after co-transfection, filtered through a 0.45 μm filter (Millipore) and concentrated using Amicon Ultra 15 with Ultracel-100 membrane (Millipore). Infectious units of each of the lentivirus particle was determined by flow cytometry using eGFP expression as marker of transduction after serial dilution and infection of HEK293T cells.

Lentiviral shRNA Transduction and FACS Sorting of mPB CD34+ Cells

[0681] mPB CD34+ transduction was performed on retronectin coated non-tissue culture treated 96 well-flat bottom plates (Corning, Inc.). Briefly, TC plates were coated with 100 μL of RetroNectin® (1 μg/mL) (TAKARABIO, Inc.), sealed and incubated at 4° C. overnight. RetroNectin® was then removed and plates were incubated with BSA (bovine serum albumin) (1%) in PBS for 30 minutes at room temperature. Subsequently, BSA (bovine serum albumin) was aspirated and replaced with 100 μL of lentiviral concentrate and centrifuged at 2000×g for 2 hours at room temperature. Next, residual supernatant was gently pipetted out and ready for transductions of mPB CD34+ cells. Ten thousand cells were plated in 150 μL of StemSpan™ Serum-free Expansion Medium (SFEM) supplemented with 50 ng/mL each of rhTPO, rhIL-6, rhFLT3L, rhSCF to initiate transduction. Cells were cultured for 72 hours prior to assessing transduction efficiencies using eGFP expression as a marker.

[0682] eGFP-positive cells were sorted on an FACSAria™ III (BD Biosciences). Briefly, the transduced mPB CD34+ cell population was washed and re-suspended with FACS buffer containing 1× Hank's buffered saline solution, EDTA (1 mM) and FBS (2%). Sorted eGFP-positive cells were used for the erythroid differentiation assay.

### Targeting CRISPR Knockout of ZNF644

[0683] Alt-R CRISPR-Cas9 crRNA and tracrRNA (5′-AGCAUAGCAAGUUAAAAUAAGGCUAGUCCGUUAUCAACUUGAAAAAGUGGCACCGAG UCGGUGCUUU-3′; SEQ ID NO: 3156) were purchased from Integrated DNA Technologies, Inc. Equimolar tracrRNA was annealed with ZNF644 targeting crRNA (Table 8) in Tris buffer (10 mM, pH 7.5) by heating at 95° C. for 5 minutes followed by cooling to room temperature using a polymerase chain reaction (PCR) machine (Bio-Rad). Subsequently, a ribonucleoprotein (RNP) complex was generated by mixing annealed tracrRNA:crRNA with 6 μg of Cas9 at 37° C. for 5 minutes in 1× buffer containing HEPES (100 mM), KCl (50 mM), MgCl₂ (2.5 mM), glycerol (0.03%), DTT (1 mM) and Tris pH 7.5 (2 mM).

[0684] Electroporation of the RNP complex was performed on a 4D-Nucleofector™ (Lonza) as per manufacturer's recommendation. Briefly, 50,000 mPB CD34+ cells resuspended in Primary Cell P3 Buffer with supplement (Lonza) were pre-mixed with 5 μL of RNP complex per well in nucleocuvettes and incubated for 5 minutes at room temperature. Subsequently, the mixture was electroporated using the CM-137 program. Cells were cultured for 72 hours post-RNP electroporation before initiating erythroid differentiation.

TABLE 8

| | | Target | | SEQ |
|---|---|---|---|---|
| | Sequence | genomic | | ID |
| Name | (5' to 3') | region | Strand | NO |
| rg_0111 | ACGGAGGCTA | random | | 3108 |
| | AGCGTCGCAA | guide, | | |
| | | non- | | |
| | | targeting | | |
| ZNF644_1 | AACGCTAATC | chr1: | − | 2634 |
| | TTCCACGGAC | 90916895- | | |
| | | 90916914 | | |
| ZNF644_2 | TCGAGGACCC | chr1: | − | 2635 |
| | TTGTCTGTTC | 90916953- | | |
| | | 90916972 | | |
| ZNF644_3 | ACAAGGGTCC | chr1: | + | 2636 |
| | TCGAAAGACT | 90916959- | | |
| | | 90916978 | | |
| ZNF644_4 | TAAACCTCGT | chr1: | + | 2637 |
| | CAGCACCATG | 90918067- | | |
| | | 90918086 | | |
| ZNF644_5 | CGAAGCAGCT | chr1: | − | 2638 |
| | TCATAGAACC | 90916794- | | |
| | | 90916813 | | |
| ZNF644_6 | CTTACAATCT | chr1: | + | 2639 |
| | AAGGCTAAAA | 90918141- | | |
| | | 90918160 | | |
| ZNF644_7 | TTGTAAACGC | chr1: | − | 2640 |
| | TAATCTTCCA | 90916900- | | |
| | | 90916919 | | |
| ZNF644_8 | AGGTTTACAT | chr1: | − | 2641 |
| | TCTCCGATGC | 90918054- | | |
| | | 90918073 | | |

Erythroid Differentiation of shRNA Transduced or RNP Electroporated mPB CD34+ Cells

[0685] Erythroid differentiation was initiated by plating 8,000 RNP-electroporated or FACS sorted eGFP+ mPB CD34+ cells per well in 96-well tissue culture plates. Base differentiation media consists of IMDM (Iscove's Modified Dulbecco's Medium), human AB serum (5%), transferrin (330 μg/mL), Insulin (10 μg/mL) and Heparin (2 IU/mL). Differentiation media was supplemented with rhSCF (100 ng/mL), rhIL-3 (10 ng/mL), rhEPO (2.5 U/mL) and hydrocortisone (1 μM). After 4 days of differentiation, the cells were split (1:4) in fresh media to maintain optimal growth density. Cells were cultured for additional 3 days and utilized for assessment of fetal hemoglobin (HbF) expression.

### HbF Intracellular Staining

[0686] One hundred thousand cells were aliquoted into U-bottom 96-well plates and stained for 20 min in the dark with diluted LIVE/DEAD fixable violet viability dye as per manufacturer's recommendation (Invitrogen). Cells were washed with FACS staining buffer and subsequently stained with anti-CD71-BV711 (BD Biosciences) and anti-CD235a-APC (BD Biosciences) for 20 mins in the dark. After two rounds of washes with three volumes of 1×PBS, cells were fixed and permeabilized with 1×BD Cytofix/Cytoperm (BD Biosciences) for 30 minutes at room temperature in the dark. Subsequently, cells were washed twice with three volumes of 1× Perm/wash buffer (BD Biosciences). Anti-HbF-FITC (ThermoScientific) was diluted (1:25) in 1× perm/wash buffer, added to permeabilized cells and incubated for 30 minutes at room temperature in the dark. Next, cells were washed twice with three volumes of 1× perm/washbuffer and analyzed by flow cytometry using LSR Fortessa (BD Biosciences). Data was analyzed with FlowJo software.

### Results

### ZNF644 Knockdown and KO Upregulate HbF Protein

[0687] In order to validate whether ZNF644 is a negative regulator of HbF expression, shRNA and CRISPR-Cas9-mediated knockdown and knockout functional genetics approaches were employed. mPB CD34+ cells were treated with shRNA or CRISPR-Cas9 reagents and erythroid differentiated for 7 days prior to flow cytometry analysis. Targeted knockdown of ZNF644 transcript results in up to 92% HbF+ cells compared to 42% for the negative control scrambled shRNA (FIG. 1A). Error bars represent standard deviation of one biological replicate with two technical replicates each. CRISPR/Cas9-mediated targeted loss of ZNF644 results in up to 85% HbF+ cells compared to 42% for random guide crRNA. ZNF644_3 and ZNF644_4 gRNAs achieved 63% and 94% editing efficiency, respectively, determined by Sanger sequencing followed by TIDE analysis. Data represents one biological sample with two technical replicates (FIG. 1B). To summarize, modulation (e.g. inhibiting) of ZNF644 by shRNA knockdown (demonstrated using five different shRNA sequences) or CRISPR knockout (demonstrated using eight different gRNA sequences) induces fetal hemoglobin expression in human primary erythroid cells. These data provide genetic evidence that ZNF644 is a regulator of fetal hemoglobin expression and represents a novel target for the treatment of sickle cell disease and beta-thalassemia.

### Tracking of Indels by Decomposition (TIDE)

[0688] Editing efficiency was determined by TIDE analysis (Brinkman, E. K., et al. Easy quantitative assessment of genome editing by sequence trace decomposition. Nucleic Acids Res. 42, e168 (2014)). Briefly, gDNA was extracted post-electroporation with 1×10⁴ cells/1 QuickExtract DNA extraction solution (Epicentre). Genomic regions containing CRISPR-targeted sites were PCR-amplified with Q5 high-fidelity DNA polymerase (New England Biolabs), purified with the QiAquick PCR purification kit (Qiagen) or ZR-96 DNA Clean & Concentrator-5 (Zymto Research) and sequenced by Sanger sequencing. Primer sequences are as follows:

ZNF644_3F:
(SEQ ID NO: 3185)
TTAAGGAATGCTAAACTGGGGA
ZNF644_3R:
(SEQ ID NO: 3186)
GCTTCGGCCATTAGTAGAGAAA
ZNF644_4F:
(SEQ ID NO: 3187)
ATGCTTCAGGGAATAGGGAAAT
ZNF644_4R:
(SEQ ID NO: 3188)
CACCTGGCCAAGCTACTTTAAT

[0689] To the extent there are any discrepancies between any sequence listing and any sequence recited in the specification, the sequence recited in the specification should be considered the correct sequence. Unless otherwise indicated, all genomic locations are according to hg38.

TABLE 1

| | | | | | gRNA_ | | |
|---|---|---|---|---|---|---|---|
| SEQ | | | target_ | target_ | target_ | | |
| ID | target_ | target_ | region_ | region | site_ | gRNA Targeting | |
| NO | gene_id | symbol | name | coordinates | coordinates | Domain | strand |
| 1 | 84146 | ZNF644 | promoter1.1 | chr1: | chr1: | AAAUACAGGAUGAUAGUUCG | + |
| | | | | 91023900- | 91024058- | | |
| | | | | 91024866 | 91024077 | | |
| 2 | 84146 | ZNF644 | promoter1.2 | chr1: | chr1: | UGAUGAAACGCUGUACAAAA | + |
| | | | | 91022273- | 91023767- | | |
| | | | | 91023899 | 91023786 | | |
| 3 | 84146 | ZNF644 | promoter1.2 | chr1: | chr1: | GUGAGACAAGUUCCUGAUCA | − |
| | | | | 91022273- | 91023636- | | |
| | | | | 91023899 | 91023655 | | |
| 4 | 84146 | ZNF644 | promoter1.2 | chr1: | chr1: | UUUGUCUGCACAUUAGUCAG | − |
| | | | | 91022273- | 91023580- | | |
| | | | | 91023899 | 91023599 | | |
| 5 | 84146 | ZNF644 | promoter1.2 | chr1: | chr1: | GGACAUUCUCAGUUUACUAU | + |
| | | | | 91022273- | 91023464- | | |
| | | | | 91023899 | 91023483 | | |
| 6 | 84146 | ZNF644 | promoter1.2 | chr1: | chr1: | AAUGGGGGAGGGGUGCUCUU | + |
| | | | | 91022273- | 91023411- | | |
| | | | | 91023899 | 91023430 | | |
| 7 | 84146 | ZNF644 | promoter1.2 | chr1: | chr1: | UAUUUGCAGUCAAUGGGGGA | + |
| | | | | 91022273- | 91023400- | | |
| | | | | 91023899 | 91023419 | | |
| 8 | 84146 | ZNF644 | promoter1.2 | chr1: | chr1: | AUAUUUGCAGUCAAUGGGGG | + |
| | | | | 91022273- | 91023399- | | |
| | | | | 91023899 | 91023418 | | |
| 9 | 84146 | ZNF644 | promoter1.2 | chr1: | chr1: | CGUAUAUAUUUGCAGUCAAU | + |
| | | | | 91022273- | 91023394- | | |
| | | | | 91023899 | 91023413 | | |
| 10 | 84146 | ZNF644 | promoter1.2 | chr1: | chr1: | ACGUAUAUAUUUGCAGUCAA | + |
| | | | | 91022273- | 91023393- | | |
| | | | | 91023899 | 91023412 | | |
| 11 | 84146 | ZNF644 | promoter1.2 | chr1: | chr1: | UCGAAGUCAUACAGUUCUUU | + |
| | | | | 91022273- | 91023308- | | |
| | | | | 91023899 | 91023327 | | |
| 12 | 84146 | ZNF644 | promoter1.2 | chr1: | chr1: | UGUAACCCAAUGAGACAAAG | + |
| | | | | 91022273- | 91023270- | | |
| | | | | 91023899 | 91023289 | | |
| 13 | 84146 | ZNF644 | promoter1.2 | chr1: | chr1: | UGCUGAAGGCAUCAUUCCAU | − |
| | | | | 91022273- | 91023125- | | |
| | | | | 91023899 | 91023144 | | |
| 14 | 84146 | ZNF644 | promoter1.2 | chr1: | chr1: | UUGUCAAAUAAAUGCAGUUA | − |
| | | | | 91022273- | 91023082- | | |
| | | | | 91023899 | 91023101 | | |
| 15 | 84146 | ZNF644 | promoter1.2 | chr1: | chr1: | CGAAUGUCAAUAACAUCUUG | − |
| | | | | 91022273- | 91023049- | | |
| | | | | 91023899 | 91023068 | | |
| 16 | 84146 | ZNF644 | promoter1.2 | chr1: | chr1: | UCAAUAACAUCUUGAGGGUU | − |
| | | | | 91022273- | 91023043- | | |
| | | | | 91023899 | 91023062 | | |
| 17 | 84146 | ZNF644 | promoter1.2 | chr1: | chr1: | CUGGUCCCGCCUUAAUUAUU | + |
| | | | | 91022273- | 91022932- | | |
| | | | | 91023899 | 91022951 | | |
| 18 | 84146 | ZNF644 | promoter1.2 | chr1: | chr1: | GUAGAUUUCUCAAGAACUCU | − |
| | | | | 91022273- | 91022913- | | |
| | | | | 91023899 | 91022932 | | |
| 19 | 84146 | ZNF644 | promoter1.2 | chr1: | chr1: | ACAUGUUAGCAGUUUCUCGU | − |
| | | | | 91022273- | 91022880- | | |
| | | | | 91023899 | 91022899 | | |
| 20 | 84146 | ZNF644 | promoter1.2 | chr1: | chr1: | GACUUCACCACAGGAUCCUG | + |
| | | | | 91022273- | 91022811- | | |
| | | | | 91023899 | 91022830 | | |
| 21 | 84146 | ZNF644 | promoter1.2 | chr1: | chr1: | AAUCAGUCCCUAGAGGGUUC | + |
| | | | | 91022273- | 91022769- | | |
| | | | | 91023899 | 91022788 | | |
| 22 | 84146 | ZNF644 | promoter1.2 | chr1: | chr1: | UCAGAGAAUCAGUCCCUAGA | + |
| | | | | 91022273- | 91022763- | | |
| | | | | 91023899 | 91022782 | | |
| 23 | 84146 | ZNF644 | promoter1.2 | chr1: | chr1: | UUCAGAGAAUCAGUCCCUAG | + |
| | | | | 91022273- | 91022762- | | |
| | | | | 91023899 | 91022781 | | |
| 24 | 84146 | ZNF644 | promoter1.2 | chr1: | chr1: | UCUAGGGACUGAUUCUCUGA | − |
| | | | | 91022273- | 91022763- | | |
| | | | | 91023899 | 91022782 | | |
| 25 | 84146 | ZNF644 | promoter1.2 | chr1: | chr1: | CUAGGGACUGAUUCUCUGAA | − |
| | | | | 91022273- | 91022762- | | |
| | | | | 91023899 | 91022781 | | |
| 26 | 84146 | ZNF644 | promoter1.2 | chr1: | chr1: | CACGACACUUUCAGUAAUGC | − |
| | | | | 91022273- | 91022692- | | |
| | | | | 91023899 | 91022711 | | |
| 27 | 84146 | ZNF644 | promoter1.2 | chr1: | chr1: | ACGACACUUUCAGUAAUGCA | − |
| | | | | 91022273- | 91022691- | | |
| | | | | 91023899 | 91022710 | | |
| 28 | 84146 | ZNF644 | promoter1.2 | chr1: | chr1: | AGUCAAACUGGAGCAAACCU | − |
| | | | | 91022273- | 91022651- | | |
| | | | | 91023899 | 91022670 | | |
| 29 | 84146 | ZNF644 | promoter1.2 | chr1: | chr1: | CCUGCCCUGAAAGGUGGCCG | + |
| | | | | 91022273- | 91022631- | | |
| | | | | 91023899 | 91022650 | | |
| 30 | 84146 | ZNF644 | promoter1.2 | chr1: | chr1: | CCCGGACAGCCUGCCCUGAA | + |
| | | | | 91022273- | 91022622- | | |
| | | | | 91023899 | 91022641 | | |
| 31 | 84146 | ZNF644 | promoter1.2 | chr1: | chr1: | CCUCGGCCACCUUUCAGGGC | − |
| | | | | 91022273- | 91022634- | | |
| | | | | 91023899 | 91022653 | | |
| 32 | 84146 | ZNF644 | promoter1.2 | chr1: | chr1: | ACCUUUCAGGGCAGGCUGUC | − |
| | | | | 91022273- | 91022626- | | |
| | | | | 91023899 | 91022645 | | |
| 33 | 84146 | ZNF644 | promoter1.2 | chr1: | chr1: | CCUUUCAGGGCAGGCUGUCC | − |
| | | | | 91022273- | 91022625- | | |
| | | | | 91023899 | 91022644 | | |
| 34 | 84146 | ZNF644 | promoter1.2 | chr1: | chr1: | AGUGUGACAUCUCAGUUACC | + |
| | | | | 91022273- | 91022604- | | |
| | | | | 91023899 | 91022623 | | |
| 35 | 84146 | ZNF644 | promoter1.2 | chr1: | chr1: | GAUUGUUGGGAGUUGCUUGA | + |
| | | | | 91022273- | 91022566- | | |
| | | | | 91023899 | 91022585 | | |
| 36 | 84146 | ZNF644 | promoter1.2 | chr1: | chr1: | UCUUAAGGGGGCAGAUUGUU | + |
| | | | | 91022273- | 91022553- | | |
| | | | | 91023899 | 91022572 | | |
| 37 | 84146 | ZNF644 | promoter1.2 | chr1: | chr1: | AUCUUAAGGGGGCAGAUUGU | + |
| | | | | 91022273- | 91022552- | | |
| | | | | 91023899 | 91022571 | | |
| 38 | 84146 | ZNF644 | promoter1.2 | chr1: | chr1: | GAAGGUUUUAGGAUCUUAAG | + |
| | | | | 91022273- | 91022540- | | |
| | | | | 91023899 | 91022559 | | |
| 39 | 84146 | ZNF644 | promoter1.2 | chr1: | chr1: | GGAAGGUUUUAGGAUCUUAA | + |
| | | | | 91022273- | 91022539- | | |
| | | | | 91023899 | 91022558 | | |
| 40 | 84146 | ZNF644 | promoter1.2 | chr1: | chr1: | GGGAAGGUUUUAGGAUCUUA | + |
| | | | | 91022273- | 91022538- | | |
| | | | | 91023899 | 91022557 | | |
| 41 | 84146 | ZNF644 | promoter1.2 | chr1: | chr1: | AAUGGCAGAGGGAAGGUUUU | + |
| | | | | 91022273- | 91022529- | | |
| | | | | 91023899 | 91022548 | | |
| 42 | 84146 | ZNF644 | promoter1.2 | chr1: | chr1: | CAAUCACAACUGUGGAGUAA | + |
| | | | | 91022273- | 91022511- | | |
| | | | | 91023899 | 91022530 | | |
| 43 | 84146 | ZNF644 | promoter1.2 | chr1: | chr1: | CAUUACUCCACAGUUGUGAU | − |
| | | | | 91022273- | 91022513- | | |
| | | | | 91023899 | 91022532 | | |
| 44 | 84146 | ZNF644 | promoter1.2 | chr1: | chr1: | UUGCUGUUUUCCUCAACAAG | − |
| | | | | 91022273- | 91022484- | | |
| | | | | 91023899 | 91022503 | | |
| 45 | 84146 | ZNF644 | promoter1.2 | chr1: | chr1: | UUUUUGCACGCUCGUGAUCG | − |
| | | | | 91022273- | 91022448- | | |
| | | | | 91023899 | 91022467 | | |
| 46 | 84146 | ZNF644 | promoter1.2 | chr1: | chr1: | CUUUAAGGUGGAACAGGCCC | + |
| | | | | 91022273- | 91022414- | | |
| | | | | 91023899 | 91022433 | | |
| 47 | 84146 | ZNF644 | promoter1.2 | chr1: | chr1: | UAGGCCCUUUAAGGUGGAAC | + |
| | | | | 91022273- | 91022408- | | |
| | | | | 91023899 | 91022427 | | |
| 48 | 84146 | ZNF644 | promoter1.2 | chr1: | chr1: | CAUGCCUAGGCCCUUUAAGG | + |
| | | | | 91022273- | 91022402- | | |
| | | | | 91023899 | 91022421 | | |
| 49 | 84146 | ZNF644 | promoter1.2 | chr1: | chr1: | CUGGGCCUGUUCCACCUUAA | − |
| | | | | 91022273- | 91022416- | | |
| | | | | 91023899 | 91022435 | | |
| 50 | 84146 | ZNF644 | promoter1.2 | chr1: | chr1: | UGGGCCUGUUCCACCUUAAA | − |
| | | | | 91022273- | 91022415- | | |
| | | | | 91023899 | 91022434 | | |
| 51 | 84146 | ZNF644 | promoter1.2 | chr1: | chr1: | AGGCAUGCCUAGGCCCUUUA | + |
| | | | | 91022273- | 91022399- | | |
| | | | | 91023899 | 91022418 | | |
| 52 | 84146 | ZNF644 | promoter1.2 | chr1: | chr1: | UGUUCCACCUUAAAGGGCCU | − |
| | | | | 91022273- | 91022409- | | |
| | | | | 91023899 | 91022428 | | |
| 53 | 84146 | ZNF644 | promoter1.2 | chr1: | chr1: | UAGGCACGCUCCAAAUAUGG | + |
| | | | | 91022273- | 91022348- | | |
| | | | | 91023899 | 91022367 | | |
| 54 | 84146 | ZNF644 | promoter1.2 | chr1: | chr1: | AAGUAGGCACGCUCCAAAUA | + |
| | | | | 91022273- | 91022345- | | |
| | | | | 91023899 | 91022364 | | |
| 55 | 84146 | ZNF644 | promoter1.2 | chr1: | chr1: | UAUUUGGAGCGUGCCUACUU | − |
| | | | | 91022273- | 91022345- | | |
| | | | | 91023899 | 91022364 | | |
| 56 | 84146 | ZNF644 | promoter1.2 | chr1: | chr1: | AUUUGGAGCGUGCCUACUUU | − |
| | | | | 91022273- | 91022344- | | |
| | | | | 91023899 | 91022363 | | |
| 57 | 84146 | ZNF644 | promoter1.2 | chr1: | chr1: | GGAGGUUCCCGCCCCAAAGU | + |
| | | | | 91022273- | 91022329- | | |
| | | | | 91023899 | 91022348 | | |
| 58 | 84146 | ZNF644 | promoter1.2 | chr1: | chr1: | UUUGGAGCGUGCCUACUUUG | − |
| | | | | 91022273- | 91022343- | | |
| | | | | 91023899 | 91022362 | | |
| 59 | 84146 | ZNF644 | promoter1.2 | chr1: | chr1: | GGAGCGUGCCUACUUUGGGG | − |
| | | | | 91022273- | 91022340- | | |
| | | | | 91023899 | 91022359 | | |
| 60 | 84146 | ZNF644 | promoter1.2 | chr1: | chr1: | GAGCGUGCCUACUUUGGGGC | − |
| | | | | 91022273- | 91022339- | | |
| | | | | 91023899 | 91022358 | | |
| 61 | 84146 | ZNF644 | promoter1.2 | chr1: | chr1: | CUUUGGGGGGGGAACCUCCU | − |
| | | | | 91022273- | 91022328- | | |
| | | | | 91023899 | 91022347 | | |
| 62 | 84146 | ZNF644 | promoter1.2 | chr1: | chr1: | UUUGGGGGGGGAACCUCCUU | − |
| | | | | 91022273- | 91022327- | | |
| | | | | 91023899 | 91022346 | | |
| 63 | 84146 | ZNF644 | promoter1.2 | chr1: | chr1: | CGCUGACCUAAUCACUCCCA | + |
| | | | | 91022273- | 91022308- | | |
| | | | | 91023899 | 91022327 | | |
| 64 | 84146 | ZNF644 | promoter1.2 | chr1: | chr1: | GGGAGUGAUUAGGUCAGCGC | − |
| | | | | 91022273- | 91022307- | | |
| | | | | 91023899 | 91022326 | | |
| 65 | 84146 | ZNF644 | promoter1.2 | chr1: | chr1: | GGAGUGAUUAGGUCAGCGCU | − |
| | | | | 91022273- | 91022306- | | |
| | | | | 91023899 | 91022325 | | |
| 66 | 84146 | ZNF644 | promoter1.2 | chr1: | chr1: | CGGGUGCCAGAAACCAAACA | + |
| | | | | 91022273- | 91022272- | | |
| | | | | 91023899 | 91022291 | | |
| 67 | 84146 | ZNF644 | promoter1.2 | chr1: | chr1: | AGGUGACCUUGUUUGGUUUC | − |
| | | | | 91022273- | 91022281- | | |
| | | | | 91023899 | 91022300 | | |
| 68 | 84146 | ZNF644 | exon_01_nc.1 | chr1: | chr1: | AAACAGUGCACCACUGUUCU | + |
| | | | | 91022256- | 91022252- | | |
| | | | | 91022272 | 91022271 | | |
| 69 | 84146 | ZNF644 | exon_01_nc.1 | chr1: | chr1: | UUUCUGGCACCCGAGAACAG | − |
| | | | | 91022256- | 91022265- | | |
| | | | | 91022272 | 91022284 | | |
| 70 | 84146 | ZNF644 | exon_01_nc.2 | chr1: | chr1: | AAUUAGACAAACGAGGGCAG | + |
| | | | | 91022082- | 91022229- | | |
| | | | | 91022255 | 91022248 | | |
| 71 | 84146 | ZNF644 | exon_01_nc.2 | chr1: | chr1: | UGGGCCAAUUAGACAAACGA | + |
| | | | | 91022082- | 91022223- | | |
| | | | | 91022255 | 91022242 | | |
| 72 | 84146 | ZNF644 | exon_01_nc.2 | chr1: | chr1: | CUGGGCCAAUUAGACAAACG | + |
| | | | | 91022082- | 91022222- | | |
| | | | | 91022255 | 91022241 | | |
| 73 | 84146 | ZNF644 | exon_01_nc.2 | chr1: | chr1: | UUCGCGCUGGUGGAGCGUCU | + |
| | | | | 91022082- | 91022204- | | |
| | | | | 91022255 | 91022223 | | |
| 74 | 84146 | ZNF644 | exon_01_nc.2 | chr1: | chr1: | CUUCGCGCUGGUGGAGCGUC | + |
| | | | | 91022082- | 91022203- | | |
| | | | | 91022255 | 91022222 | | |
| 75 | 84146 | ZNF644 | exon_01_nc.2 | chr1: | chr1: | CCCGGGAAGCUUCGCGCUGG | + |
| | | | | 91022082- | 91022194- | | |
| | | | | 91022255 | 91022213 | | |
| 76 | 84146 | ZNF644 | exon_01_nc.2 | chr1: | chr1: | GCUCCCGGGAAGCUUCGCGC | + |
| | | | | 91022082- | 91022191- | | |
| | | | | 91022255 | 91022210 | | |
| 77 | 84146 | ZNF644 | exon_01_nc.2 | chr1: | chr1: | UCCACCAGCGCGAAGCUUCC | − |
| | | | | 91022082- | 91022198- | | |
| | | | | 91022255 | 91022217 | | |
| 78 | 84146 | ZNF644 | exon_01_nc.2 | chr1: | chr1: | CCACCAGCGCGAAGCUUCCC | − |
| | | | | 91022082- | 91022197- | | |
| | | | | 91022255 | 91022216 | | |
| 79 | 84146 | ZNF644 | exon_01_nc.2 | chr1: | chr1: | GCUUCCCGGGAGCUCCUCGC | − |
| | | | | 91022082- | 91022184- | | |
| | | | | 91022255 | 91022203 | | |
| 80 | 84146 | ZNF644 | exon_01_nc.2 | chr1: | chr1: | GCCUCCAGCCCCGGUUCCCA | + |
| | | | | 91022082- | 91022107- | | |
| | | | | 91022255 | 91022126 | | |
| 81 | 84146 | ZNF644 | exon_01_nc.2 | chr1: | chr1: | CGCGCCUGCGCCGUGGGAAC | − |
| | | | | 91022082- | 91022120- | | |
| | | | | 91022255 | 91022139 | | |
| 82 | 84146 | ZNF644 | exon_01_nc.2 | chr1: | chr1: | GCGCCUGCGCCGUGGGAACC | − |
| | | | | 91022082- | 91022119- | | |
| | | | | 91022255 | 91022138 | | |
| 83 | 84146 | ZNF644 | exon_01_nc.2 | chr1: | chr1: | CGCCUGCGCCGUGGGAACCG | − |
| | | | | 91022082- | 91022118- | | |
| | | | | 91022255 | 91022137 | | |
| 84 | 84146 | ZNF644 | exon_01_nc.3 | chr1: | chr1: | UGUACGCUACUCGGCUCCAG | + |
| | | | | 91022056- | 91022061- | | |
| | | | | 91022081 | 91022080 | | |
| 85 | 84146 | ZNF644 | exon_01_nc.3 | chr1: | chr1: | ACGCCGCUCUGUACGCUACU | + |
| | | | | 91022056- | 91022052- | | |
| | | | | 91022081 | 91022071 | | |
| 86 | 84146 | ZNF644 | exon_01_nc.3 | chr1: | chr1: | GAGCCGAGUAGCGUACAGAG | − |
| | | | | 91022056- | 91022058- | | |
| | | | | 91022081 | 91022077 | | |
| 87 | 84146 | ZNF644 | exon_01_nc.4 | chr1: | chr1: | UACAGAGCGGCGUGUGACGC | − |
| | | | | 91022036- | 91022045- | | |
| | | | | 91022055 | 91022064 | | |
| 88 | 84146 | ZNF644 | exon_01_nc.4 | chr1: | chr1: | ACAGAGCGGCGUGUGACGCG | − |
| | | | | 91022036- | 91022044- | | |
| | | | | 91022055 | 91022063 | | |
| 89 | 84146 | ZNF644 | exon_01_nc.5 | chr1: | chr1: | CGUCAAACCGGGGCGACGUU | + |
| | | | | 91022015- | 91022006- | | |
| | | | | 91022035 | 91022025 | | |
| 90 | 84146 | ZNF644 | exon_01_nc.5 | chr1: | chr1: | GCGUCAAACCGGGGCGACGU | + |
| | | | | 91022015- | 91022005- | | |
| | | | | 91022035 | 91022024 | | |
| 91 | 84146 | ZNF644 | exon_01_nc.5 | chr1: | chr1: | GCGUGCUCCCAACGUCGCCC | − |
| | | | | 91022015- | 91022016- | | |
| | | | | 91022035 | 91022035 | | |
| 92 | 84146 | ZNF644 | exon_01_nc.6 | chr1: | chr1: | GUGCCGUGUGCGUCAAACCG | + |
| | | | | 91021990- | 91021996- | | |
| | | | | 91022014 | 91022015 | | |
| 93 | 84146 | ZNF644 | exon_01_nc.6 | chr1: | chr1: | GGUGCCGUGUGCGUCAAACC | + |
| | | | | 91021990- | 91021995- | | |
| | | | | 91022014 | 91022014 | | |
| 94 | 84146 | ZNF644 | exon_01_nc.6 | chr1: | chr1: | UGGUGCCGUGUGCGUCAAAC | + |
| | | | | 91021990- | 91021994- | | |
| | | | | 91022014 | 91022013 | | |
| 95 | 84146 | ZNF644 | exon_01_nc.6 | chr1: | chr1: | UCGCCCCGGUUUGACGCACA | − |
| | | | | 91021990- | 91022002- | | |
| | | | | 91022014 | 91022021 | | |
| 96 | 84146 | ZNF644 | exon_01_nc.6 | chr1: | chr1: | AACCCCUGAAACUCACAGUU | + |
| | | | | 91021990- | 91021974- | | |
| | | | | 91022014 | 91021993 | | |
| 97 | 84146 | ZNF644 | intron_01 | chr1: | chr1: | GGCACCAAACUGUGAGUUUC | − |
| | | | | 91021726- | 91021981- | | |
| | | | | 91021989 | 91022000 | | |
| 98 | 84146 | ZNF644 | intron_01 | chr1: | chr1: | GGUUAUUUGGUCAGAUUCGC | − |
| | | | | 91021726- | 91021958- | | |
| | | | | 91021989 | 91021977 | | |
| 99 | 84146 | ZNF644 | intron_01 | chr1: | chr1: | GUUAUUUGGUCAGAUUCGCU | − |
| | | | | 91021726- | 91021957- | | |
| | | | | 91021989 | 91021976 | | |
| 100 | 84146 | ZNF644 | intron_01 | chr1: | chr1: | AGAUUCGCUGGGACCCGAGU | − |
| | | | | 91021726- | 91021946- | | |
| | | | | 91021989 | 91021965 | | |
| 101 | 84146 | ZNF644 | intron_01 | chr1: | chr1: | CCAGAGGCCCGAAACCCACU | + |
| | | | | 91021726- | 91021929- | | |
| | | | | 91021989 | 91021948 | | |
| 102 | 84146 | ZNF644 | intron_01 | chr1: | chr1: | CUGGGACCCGAGUGGGUUUC | − |
| | | | | 91021726- | 91021939- | | |
| | | | | 91021989 | 91021958 | | |
| 103 | 84146 | ZNF644 | intron_01 | chr1: | chr1: | CCGAGUGGGUUUCGGGCCUC | − |
| | | | | 91021726- | 91021932- | | |
| | | | | 91021989 | 91021951 | | |
| 104 | 84146 | ZNF644 | intron_01 | chr1: | chr1: | CGAGUGGGUUUCGGGCCUCU | − |
| | | | | 91021726- | 91021931- | | |
| | | | | 91021989 | 91021950 | | |
| 105 | 84146 | ZNF644 | intron_01 | chr1: | chr1: | GGUUUCGGGCCUCUGGGCUG | − |
| | | | | 91021726- | 91021925- | | |
| | | | | 91021989 | 91021944 | | |
| 106 | 84146 | ZNF644 | intron_01 | chr1: | chr1: | UGAGGGUGGCGGAAGAACUU | − |
| | | | | 91021726- | 91021890- | | |
| | | | | 91021989 | 91021909 | | |
| 107 | 84146 | ZNF644 | intron_01 | chr1: | chr1: | GAGGGUGGCGGAAGAACUUG | − |
| | | | | 91021726- | 91021889- | | |
| | | | | 91021989 | 91021908 | | |
| 108 | 84146 | ZNF644 | intron_01 | chr1: | chr1: | AACUUGGGGGACCCGGCCUC | − |
| | | | | 91021726- | 91021875- | | |
| | | | | 91021989 | 91021894 | | |
| 109 | 84146 | ZNF644 | intron_01 | chr1: | chr1: | AGCUCCCCGGGCCCGAGAGC | + |
| | | | | 91021726- | 91021853- | | |
| | | | | 91021989 | 91021872 | | |
| 110 | 84146 | ZNF644 | intron_01 | chr1: | chr1: | CGGGGAGCUACGCCCUAGGC | − |
| | | | | 91021726- | 91021842- | | |
| | | | | 91021989 | 91021861 | | |
| 111 | 84146 | ZNF644 | intron_01 | chr1: | chr1: | GGGGAGCUACGCCCUAGGCU | − |
| | | | | 91021726- | 91021841- | | |
| | | | | 91021989 | 91021860 | | |
| 112 | 84146 | ZNF644 | intron_01 | chr1: | chr1: | AUGCGUCCUUUUGGAUGGCU | + |
| | | | | 91021726- | 91021814- | | |
| | | | | 91021989 | 91021833 | | |
| 113 | 84146 | ZNF644 | intron_01 | chr1: | chr1: | AAUGCGUCCUUUUGGAUGGC | + |
| | | | | 91021726- | 91021813- | | |
| | | | | 91021989 | 91021832 | | |
| 114 | 84146 | ZNF644 | intron_01 | chr1: | chr1: | GCAAAAUGCGUCCUUUUGGA | + |
| | | | | 91021726- | 91021809- | | |
| | | | | 91021989 | 91021828 | | |
| 115 | 84146 | ZNF644 | intron_01 | chr1: | chr1: | UGCGGCAAAAUGCGUCCUUU | + |
| | | | | 91021726- | 91021805- | | |
| | | | | 91021989 | 91021824 | | |
| 116 | 84146 | ZNF644 | intron_01 | chr1: | chr1: | AAGGACGCAUUUUGCCGCAC | − |
| | | | | 91021726- | 91021804- | | |
| | | | | 91021989 | 91021823 | | |
| 117 | 84146 | ZNF644 | intron_01 | chr1: | chr1: | UUUUGCCGCACAGGCUAAGA | − |
| | | | | 91021726- | 91021795- | | |
| | | | | 91021989 | 91021814 | | |
| 118 | 84146 | ZNF644 | intron_01 | chr1: | chr1: | CGCACAGGCUAAGAUGGCGG | − |
| | | | | 91021726- | 91021789- | | |
| | | | | 91021989 | 91021808 | | |
| 119 | 84146 | ZNF644 | intron_01 | chr1: | chr1: | GGCGGAGUUGGUGCUACACA | − |
| | | | | 91021726- | 91021756- | | |
| | | | | 91021989 | 91021775 | | |
| 120 | 84146 | ZNF644 | intron_01 | chr1: | chr1: | UACACAAGGAGCCCGGGCCC | − |
| | | | | 91021726- | 91021742- | | |
| | | | | 91021989 | 91021761 | | |
| 121 | 84146 | ZNF644 | intron_01 | chr1: | chr1: | GCCUCCCCGAACCCGGGGCC | + |
| | | | | 91021726- | 91021727- | | |
| | | | | 91021989 | 91021746 | | |
| 122 | 84146 | ZNF644 | intron_01 | chr1: | chr1: | AGGAGCCCGGGCCCCGGGUU | − |
| | | | | 91021726- | 91021736- | | |
| | | | | 91021989 | 91021755 | | |
| 123 | 84146 | ZNF644 | intron_01 | chr1: | chr1: | GAGCCCGGGCCCCGGGUUCG | − |
| | | | | 91021726- | 91021734- | | |
| | | | | 91021989 | 91021753 | | |
| 124 | 84146 | ZNF644 | exon_02_nc | chr1: | chr1: | GUGGCCCCCAGCGACCGCCG | + |
| | | | | 91021689- | 91021699- | | |
| | | | | 91021725 | 91021718 | | |
| 125 | 84146 | ZNF644 | exon_02_nc | chr1: | chr1: | GCGGCGGUCGCUGGGGGCCA | − |
| | | | | 91021689- | 91021700- | | |
| | | | | 91021725 | 91021719 | | |
| 126 | 84146 | ZNF644 | exon_02_nc | chr1: | chr1: | GCCGCUCACCUCAGGCUCCG | + |
| | | | | 91021689- | 91021680- | | |
| | | | | 91021725 | 91021699 | | |
| 127 | 84146 | ZNF644 | intron_02 | chr1: | chr1: | CGGCGGCCGCCGCUCACCUC | + |
| | | | | 91021509- | 91021672- | | |
| | | | | 91021688 | 91021691 | | |
| 128 | 84146 | ZNF644 | intron_02 | chr1: | chr1: | ACGGAGCCUGAGGUGAGCGG | − |
| | | | | 91021509- | 91021681- | | |
| | | | | 91021688 | 91021700 | | |
| 129 | 84146 | ZNF644 | intron_02 | chr1: | chr1: | ACUCGGCGGGGGGAUGGGGG | − |
| | | | | 91021509- | 91021640- | | |
| | | | | 91021688 | 91021659 | | |
| 130 | 84146 | ZNF644 | intron_02 | chr1: | chr1: | CGGAUCCUCCGACGCCGCAG | + |
| | | | | 91021509- | 91021608- | | |
| | | | | 91021688 | 91021627 | | |
| 131 | 84146 | ZNF644 | intron_02 | chr1: | chr1: | GGGGCUUUCCGCUGCGGCGU | − |
| | | | | 91021509- | 91021619- | | |
| | | | | 91021688 | 91021638 | | |
| 132 | 84146 | ZNF644 | intron_02 | chr1: | chr1: | GCUUUCCGCUGCGGCGUCGG | − |
| | | | | 91021509- | 91021616- | | |
| | | | | 91021688 | 91021635 | | |
| 133 | 84146 | ZNF644 | intron_02 | chr1: | chr1: | GGCGUCGGAGGAUCCGGUAG | |
| | | | | 91021509- | 91021604- | | |
| | | | | 91021688 | 91021623 | | |
| 134 | 84146 | ZNF644 | intron_02 | chr1: | chr1: | AGCCCCUUUGUGUCCGCUAC | + |
| | | | | 91021509- | 91021588- | | |
| | | | | 91021688 | 91021607 | | |
| 135 | 84146 | ZNF644 | intron_02 | chr1: | chr1: | GGAUCCGGUAGCGGACACAA | − |
| | | | | 91021509- | 91021595- | | |
| | | | | 91021688 | 91021614 | | |
| 136 | 84146 | ZNF644 | intron_02 | chr1: | chr1: | GAUCCGGUAGCGGACACAAA | − |
| | | | | 91021509- | 91021594- | | |
| | | | | 91021688 | 91021613 | | |
| 137 | 84146 | ZNF644 | intron_02 | chr1: | chr1: | AUCCGGUAGCGGACACAAAG | − |
| | | | | 91021509- | 91021593- | | |
| | | | | 91021688 | 91021612 | | |
| 138 | 84146 | ZNF644 | intron_02 | chr1: | chr1: | CGGACACAAAGGGGCUGAGC | − |
| | | | | 91021509- | 91021584- | | |
| | | | | 91021688 | 91021603 | | |
| 139 | 84146 | ZNF644 | intron_02 | chr1: | chr1: | CUGAGCUGGGCACUAGACUU | − |
| | | | | 91021509- | 91021570- | | |
| | | | | 91021688 | 91021589 | | |
| 140 | 84146 | ZNF644 | intron_02 | chr1: | chr1: | UGAGCUGGGCACUAGACUUG | − |
| | | | | 91021509- | 91021569- | | |
| | | | | 91021688 | 91021588 | | |
| 141 | 84146 | ZNF644 | intron_02 | chr1: | chr1: | GAGCUGGGCACUAGACUUGG | − |
| | | | | 91021509- | 91021568- | | |
| | | | | 91021688 | 91021587 | | |
| 142 | 84146 | ZNF644 | intron_02 | chr1: | chr1: | CGAGCAGCCAGUGAGCAGUA | − |
| | | | | 91021509- | 91021524- | | |
| | | | | 91021688 | 91021543 | | |
| 143 | 84146 | ZNF644 | exon_03_nc.1 | chr1: | chr1: | CUCCCCAAGCCGCCUGAUCU | + |
| | | | | 91021474- | 91021490- | | |
| | | | | 91021508 | 91021509 | | |
| 144 | 84146 | ZNF644 | exon_03_nc.1 | chr1: | chr1: | GGGGCCGAGAUCAGGCGGCU | − |
| | | | | 91021474- | 91021497- | | |
| | | | | 91021508 | 91021516 | | |
| 145 | 84146 | ZNF644 | exon_03_nc.1 | chr1: | chr1: | GGGCCGAGAUCAGGCGGCUU | − |
| | | | | 91021474- | 91021496- | | |
| | | | | 91021508 | 91021515 | | |
| 146 | 84146 | ZNF644 | exon_03_nc.1 | chr1: | chr1: | GGCCGAGAUCAGGCGGCUUG | − |
| | | | | 91021474- | 91021495- | | |
| | | | | 91021508 | 91021514 | | |
| 147 | 84146 | ZNF644 | exon_03_nc.1 | chr1: | chr1: | GCAUUGCAAUGGCGACCGCC | + |
| | | | | 91021474- | 91021467- | | |
| | | | | 91021508 | 91021486 | | |
| 148 | 84146 | ZNF644 | exon_03_nc.2 | chr1: | chr1: | CGUUACUCAGUGCAUUGCAA | + |
| | | | | 91021458- | 91021456- | | |
| | | | | 91021473 | 91021475 | | |
| 149 | 84146 | ZNF644 | exon_03_nc.2 | chr1: | chr1: | UUGCAAUGCACUGAGUAACG | − |
| | | | | 91021458- | 91021456- | | |
| | | | | 91021473 | 91021475 | | |
| 150 | 84146 | ZNF644 | exon_03_nc.3 | chr1: | chr1: | CAAUGCACUGAGUAACGGGG | − |
| | | | | 91021273- | 91021453- | | |
| | | | | 91021457 | 91021472 | | |
| 151 | 84146 | ZNF644 | exon_03_nc.3 | chr1: | chr1: | AAUGCACUGAGUAACGGGGC | − |
| | | | | 91021273- | 91021452- | | |
| | | | | 91021457 | 91021471 | | |
| 152 | 84146 | ZNF644 | exon_03_nc.3 | chr1: | chr1: | GCAGCCUCAACGAGAGGGGU | + |
| | | | | 91021273- | 91021413- | | |
| | | | | 91021457 | 91021432 | | |
| 153 | 84146 | ZNF644 | exon_03_nc.3 | chr1: | chr1: | CCGAGCAGCCUCAACGAGAG | + |
| | | | | 91021273- | 91021409- | | |
| | | | | 91021457 | 91021428 | | |
| 154 | 84146 | ZNF644 | exon_03_nc.3 | chr1: | chr1: | ACCGAGCAGCCUCAACGAGA | + |
| | | | | 91021273- | 91021408- | | |
| | | | | 91021457 | 91021427 | | |
| 155 | 84146 | ZNF644 | exon_03_nc.3 | chr1: | chr1: | AACCGAGCAGCCUCAACGAG | + |
| | | | | 91021273- | 91021407- | | |
| | | | | 91021457 | 91021426 | | |
| 156 | 84146 | ZNF644 | exon_03_nc.3 | chr1: | chr1: | GUCACCAACCCCUCUCGUUG | − |
| | | | | 91021273- | 91021420- | | |
| | | | | 91021457 | 91021439 | | |
| 157 | 84146 | ZNF644 | exon_03_nc.3 | chr1: | chr1: | CCCCUCUCGUUGAGGCUGCU | − |
| | | | | 91021273- | 91021412- | | |
| | | | | 91021457 | 91021431 | | |
| 158 | 84146 | ZNF644 | exon_03_nc.3 | chr1: | chr1: | UCGUUGAGGCUGCUCGGUUG | − |
| | | | | 91021273- | 91021406- | | |
| | | | | 91021457 | 91021425 | | |
| 159 | 84146 | ZNF644 | exon_03_nc.3 | chr1: | chr1: | UCGGUUGUGGCCAGAAACGC | − |
| | | | | 91021273- | 91021393- | | |
| | | | | 91021457 | 91021412 | | |
| 160 | 84146 | ZNF644 | exon_03_nc.3 | chr1: | chr1: | CUACACCCCUCCCCUUACUU | − |
| | | | | 91021273- | 91021354- | | |
| | | | | 91021457 | 91021373 | | |
| 161 | 84146 | ZNF644 | exon_03_nc.3 | chr1: | chr1: | UGCGGUCCUGUCCCAAGUAA | + |
| | | | | 91021273- | 91021340- | | |
| | | | | 91021457 | 91021359 | | |
| 162 | 84146 | ZNF644 | exon_03_nc.3 | chr1: | chr1: | AUGCGGUCCUGUCCCAAGUA | + |
| | | | | 91021273- | 91021339- | | |
| | | | | 91021457 | 91021358 | | |
| 163 | 84146 | ZNF644 | exon_03_nc.3 | chr1: | chr1: | AUCUUGCAGGACGGGGGGAG | + |
| | | | | 91021273- | 91021310- | | |
| | | | | 91021457 | 91021329 | | |
| 164 | 84146 | ZNF644 | exon_03_nc.3 | chr1: | chr1: | GAUCUUGCAGGACGGGGGGA | + |
| | | | | 91021273- | 91021309- | | |
| | | | | 91021457 | 91021328 | | |
| 165 | 84146 | ZNF644 | exon_03_nc.3 | chr1: | chr1: | AUAAGAUCUUGCAGGACGGG | + |
| | | | | 91021273- | 91021305- | | |
| | | | | 91021457 | 91021324 | | |
| 166 | 84146 | ZNF644 | exon_03_nc.3 | chr1: | chr1: | CAUAAGAUCUUGCAGGACGG | + |
| | | | | 91021273- | 91021304- | | |
| | | | | 91021457 | 91021323 | | |
| 167 | 84146 | ZNF644 | exon_03_nc.3 | chr1: | chr1: | GCAUAAGAUCUUGCAGGACG | + |
| | | | | 91021273- | 91021303- | | |
| | | | | 91021457 | 91021322 | | |
| 168 | 84146 | ZNF644 | exon_03_nc.3 | chr1: | chr1: | CGCAUAAGAUCUUGCAGGAC | + |
| | | | | 91021273- | 91021302- | | |
| | | | | 91021457 | 91021321 | | |
| 169 | 84146 | ZNF644 | exon_03_nc.3 | chr1: | chr1: | CCGCAUAAGAUCUUGCAGGA | + |
| | | | | 91021273- | 91021301- | | |
| | | | | 91021457 | 91021320 | | |
| 170 | 84146 | ZNF644 | exon_03_nc.3 | chr1: | chr1: | CUAGCCGCAUAAGAUCUUGC | + |
| | | | | 91021273- | 91021297- | | |
| | | | | 91021457 | 91021316 | | |
| 171 | 84146 | ZNF644 | exon_03_nc.3 | chr1: | chr1: | CCGUCCUGCAAGAUCUUAUG | − |
| | | | | 91021273- | 91021304- | | |
| | | | | 91021457 | 91021323 | | |
| 172 | 84146 | ZNF644 | exon_03_nc.3 | chr1: | chr1: | CUGCAAGAUCUUAUGCGGCU | − |
| | | | | 91021273- | 91021299- | | |
| | | | | 91021457 | 91021318 | | |
| 173 | 84146 | ZNF644 | exon_03_nc.3 | chr1: | chr1: | AUCUUAUGCGGCUAGGUGCC | − |
| | | | | 91021273- | 91021292- | | |
| | | | | 91021457 | 91021311 | | |
| 174 | 84146 | ZNF644 | exon_03_nc.3 | chr1: | chr1: | UCUUAUGCGGCUAGGUGCCU | − |
| | | | | 91021273- | 91021291- | | |
| | | | | 91021457 | 91021310 | | |
| 175 | 84146 | ZNF644 | exon_03_nc.3 | chr1: | chr1: | ACCUCUUGCUGUUACUUCCC | + |
| | | | | 91021273- | 91021271- | | |
| | | | | 91021457 | 91021290 | | |
| 176 | 84146 | ZNF644 | intron_03 | chr1: | chr1: | GGUAAAUCGCUCGAAGUGUU | − |
| | | | | 91021202- | 91021254- | | |
| | | | | 91021272 | 91021273 | | |
| 177 | 84146 | ZNF644 | intron_03 | chr1: | chr1: | GUAAAUCGCUCGAAGUGUUU | − |
| | | | | 91021202- | 91021253- | | |
| | | | | 91021272 | 91021272 | | |
| 178 | 84146 | ZNF644 | intron_03 | chr1: | chr1: | CUCGAAGUGUUUGGGUUGCC | − |
| | | | | 91021202- | 91021245- | | |
| | | | | 91021272 | 91021264 | | |
| 179 | 84146 | ZNF644 | intron_03 | chr1: | chr1: | UCGAAGUGUUUGGGUUGCCA | − |
| | | | | 91021202- | 91021244- | | |
| | | | | 91021272 | 91021263 | | |
| 180 | 84146 | ZNF644 | intron_03 | chr1: | chr1: | CGAAGUGUUUGGGUUGCCAG | − |
| | | | | 91021202- | 91021243- | | |
| | | | | 91021272 | 91021262 | | |
| 181 | 84146 | ZNF644 | intron_03 | chr1: | chr1: | GAGAGGCAAAAAGCUUUAGC | + |
| | | | | 91021202- | 91021205- | | |
| | | | | 91021272 | 91021224 | | |
| 182 | 84146 | ZNF644 | exon_04_nc.1 | chr1: | chr1: | GUAACUUCCCAGGGACACAA | + |
| | | | | 91020529- | 91021165- | | |
| | | | | 91021201 | 91021184 | | |
| 183 | 84146 | ZNF644 | exon_04_nc.1 | chr1: | chr1: | UCUGGCAGAGUAACUUCCCA | + |
| | | | | 91020529- | 91021156- | | |
| | | | | 91021201 | 91021175 | | |
| 184 | 84146 | ZNF644 | exon_04_nc.1 | chr1: | chr1: | CUCUGGCAGAGUAACUUCCC | + |
| | | | | 91020529- | 91021155- | | |
| | | | | 91021201 | 91021174 | | |
| 185 | 84146 | ZNF644 | exon_04_nc.1 | chr1: | chr1: | CUUCAGGUUCACGGGAGAAG | + |
| | | | | 91020529- | 91021117- | | |
| | | | | 91021201 | 91021136 | | |
| 186 | 84146 | ZNF644 | exon_04_nc.1 | chr1: | chr1: | ACAACUCAUCUUCAGGUUCA | + |
| | | | | 91020529- | 91021108- | | |
| | | | | 91021201 | 91021127 | | |
| 187 | 84146 | ZNF644 | exon_04_nc.1 | chr1: | chr1: | GUCUGGGACAACUCAUCUUC | + |
| | | | | 91020529- | 91021101- | | |
| | | | | 91021201 | 91021120 | | |
| 188 | 84146 | ZNF644 | exon_04_nc.1 | chr1: | chr1: | CCAAUCACUGAGAAGAGUCU | + |
| | | | | 91020529- | 91021085- | | |
| | | | | 91021201 | 91021104 | | |
| 189 | 84146 | ZNF644 | exon_04_nc.1 | chr1: | chr1: | UCCAAUCACUGAGAAGAGUC | + |
| | | | | 91020529- | 91021084- | | |
| | | | | 91021201 | 91021103 | | |
| 190 | 84146 | ZNF644 | exon_04_nc.1 | chr1: | chr1: | CCCAGACUCUUCUCAGUGAU | − |
| | | | | 91020529- | 91021088- | | |
| | | | | 91021201 | 91021107 | | |
| 191 | 84146 | ZNF644 | exon_04_nc.1 | chr1: | chr1: | AACUUAGGUGGUGGAGCUAA | − |
| | | | | 91020529- | 91021064- | | |
| | | | | 91021201 | 91021083 | | |
| 192 | 84146 | ZNF644 | exon_04_nc.1 | chr1: | chr1: | CUCUUGUUGGGAUCCAUCUA | − |
| | | | | 91020529- | 91021013- | | |
| | | | | 91021201 | 91021032 | | |
| 193 | 84146 | ZNF644 | exon_04_nc.1 | chr1: | chr1: | UAAUGUUGCUAAACCAUAGA | + |
| | | | | 91020529- | 91020997- | | |
| | | | | 91021201 | 91021016 | | |
| 194 | 84146 | ZNF644 | exon_04_nc.1 | chr1: | chr1: | CUAUGGUUUAGCAACAUUAG | − |
| | | | | 91020529- | 91020996- | | |
| | | | | 91021201 | 91021015 | | |
| 195 | 84146 | ZNF644 | exon_04_nc.1 | chr1: | chr1: | UGUGAUCAUCAAACUCAACG | − |
| | | | | 91020529- | 91020911- | | |
| | | | | 91021201 | 91020930 | | |
| 196 | 84146 | ZNF644 | exon_04_nc.1 | chr1: | chr1: | GUGAUCAUCAAACUCAACGA | − |
| | | | | 91020529- | 91020910- | | |
| | | | | 91021201 | 91020929 | | |
| 197 | 84146 | ZNF644 | exon_04_nc.1 | chr1: | chr1: | AACGAGGGGAUAAACAUAAU | − |
| | | | | 91020529- | 91020895- | | |
| | | | | 91021201 | 91020914 | | |
| 198 | 84146 | ZNF644 | exon_04_nc.1 | chr1: | chr1: | ACGAGGGGAUAAACAUAAUU | − |
| | | | | 91020529- | 91020894- | | |
| | | | | 91021201 | 91020913 | | |
| 199 | 84146 | ZNF644 | exon_04_nc.1 | chr1: | chr1: | CGAGGGGAUAAACAUAAUUG | − |
| | | | | 91020529- | 91020893- | | |
| | | | | 91021201 | 91020912 | | |
| 200 | 84146 | ZNF644 | exon_04_nc.1 | chr1: | chr1: | GAGGGGAUAAACAUAAUUGG | − |
| | | | | 91020529- | 91020892- | | |
| | | | | 91021201 | 91020911 | | |
| 201 | 84146 | ZNF644 | exon_04_nc.1 | chr1: | chr1: | ACAUAAUUGGGGGCGAAUGA | − |
| | | | | 91020529- | 91020882- | | |
| | | | | 91021201 | 91020901 | | |
| 202 | 84146 | ZNF644 | exon_04_nc.1 | chr1: | chr1: | GGACUGGACAGGAUAGUCGG | + |
| | | | | 91020529- | 91020817- | | |
| | | | | 91021201 | 91020836 | | |
| 203 | 84146 | ZNF644 | exon_04_nc.1 | chr1: | chr1: | GCGUGGAAUUAGGACUGGAC | + |
| | | | | 91020529- | 91020806- | | |
| | | | | 91021201 | 91020825 | | |
| 204 | 84146 | ZNF644 | exon_04_nc.1 | chr1: | chr1: | AACAAGCGUGGAAUUAGGAC | + |
| | | | | 91020529- | 91020801- | | |
| | | | | 91021201 | 91020820 | | |
| 205 | 84146 | ZNF644 | exon_04_nc.1 | chr1: | chr1: | GAUGCAACAAGCGUGGAAUU | + |
| | | | | 91020529- | 91020796- | | |
| | | | | 91021201 | 91020815 | | |
| 206 | 84146 | ZNF644 | exon_04_nc.1 | chr1: | chr1: | CCAUCCAGAUGCAACAAGCG | + |
| | | | | 91020529- | 91020789- | | |
| | | | | 91021201 | 91020808 | | |
| 207 | 84146 | ZNF644 | exon_04_nc.1 | chr1: | chr1: | AAUUCCACGCUUGUUGCAUC | − |
| | | | | 91020529- | 91020796- | | |
| | | | | 91021201 | 91020815 | | |
| 208 | 84146 | ZNF644 | exon_04_nc.1 | chr1: | chr1: | CCACGCUUGUUGCAUCUGGA | − |
| | | | | 91020529- | 91020792- | | |
| | | | | 91021201 | 91020811 | | |
| 209 | 84146 | ZNF644 | exon_04_nc.1 | chr1: | chr1: | UAAAGCAAACUACUGCAGGG | + |
| | | | | 91020529- | 91020742- | | |
| | | | | 91021201 | 91020761 | | |
| 210 | 84146 | ZNF644 | exon_04_nc.1 | chr1: | chr1: | CAACUAAAGCAAACUACUGC | + |
| | | | | 91020529- | 91020738- | | |
| | | | | 91021201 | 91020757 | | |
| 211 | 84146 | ZNF644 | exon_04_nc.1 | chr1: | chr1: | CAUUUUUUGGUCCCAUGAGA | − |
| | | | | 91020529- | 91020714- | | |
| | | | | 91021201 | 91020733 | | |
| 212 | 84146 | ZNF644 | exon_04_nc.1 | chr1: | chr1: | AGUUGCAUGUGUAAGUAUCU | − |
| | | | | 91020529- | 91020627- | | |
| | | | | 91021201 | 91020646 | | |
| 213 | 84146 | ZNF644 | exon_04_nc.1 | chr1: | chr1: | UAAGUAUCUAGGGAACUUGA | − |
| | | | | 91020529- | 91020616- | | |
| | | | | 91021201 | 91020635 | | |
| 214 | 84146 | ZNF644 | exon_04_nc.1 | chr1: | chr1: | CAGUAAUAUUGCAUUUUGGU | − |
| | | | | 91020529- | 91020593- | | |
| | | | | 91021201 | 91020612 | | |
| 215 | 84146 | ZNF644 | exon_04_nc.1 | chr1: | chr1: | AAAACCUCGUUUUUAUAAUA | − |
| | | | | 91020529- | 91020560- | | |
| | | | | 91021201 | 91020579 | | |
| 216 | 84146 | ZNF644 | exon_04_nc.1 | chr1: | chr1: | UCUAGCUUAGACAUUUUAAU | − |
| | | | | 91020529- | 91020531- | | |
| | | | | 91021201 | 91020550 | | |
| 217 | 84146 | ZNF644 | exon_04_nc.2 | chr1: | chr1: | CUUGAUUAGUAUUAAUGCAG | − |
| | | | | 91020448- | 91020496- | | |
| | | | | 91020528 | 91020515 | | |
| 218 | 84146 | ZNF644 | intron_04 | chr1: | chr1: | AAACACCUAAUGUUUUGUGU | − |
| | | | | 90982371- | 91020370- | | |
| | | | | 91020447 | 91020389 | | |
| 219 | 84146 | ZNF644 | intron_04 | chr1: | chr1: | UGGCAAUUAACAGAAUUCCU | − |
| | | | | 90982371- | 91020350- | | |
| | | | | 91020447 | 91020369 | | |
| 220 | 84146 | ZNF644 | intron_04 | chr1: | chr1: | ACAGUCUUGUAUUAAUGAAU | − |
| | | | | 90982371- | 91020185- | | |
| | | | | 91020447 | 91020204 | | |
| 221 | 84146 | ZNF644 | intron_04 | chr1: | chr1: | ACUGUAAAACUUUAUGAUCC | + |
| | | | | 90982371- | 91020132- | | |
| | | | | 91020447 | 91020151 | | |
| 222 | 84146 | ZNF644 | intron_04 | chr1: | chr1: | CAAUAUAUUGUAAAAGAGGA | + |
| | | | | 90982371- | 91020079- | | |
| | | | | 91020447 | 91020098 | | |
| 223 | 84146 | ZNF644 | intron_04 | chr1: | chr1: | ACCAGAGAUGAUUAAGUUAG | − |
| | | | | 90982371- | 91020056- | | |
| | | | | 91020447 | 91020075 | | |
| 224 | 84146 | ZNF644 | intron_04 | chr1: | chr1: | UGAUUAAGUUAGUGGCAUAA | − |
| | | | | 90982371- | 91020048- | | |
| | | | | 91020447 | 91020067 | | |
| 225 | 84146 | ZNF644 | intron_04 | chr1: | chr1: | AUACAAACAGCAAUGGGUAG | + |
| | | | | 90982371- | 91020007- | | |
| | | | | 91020447 | 91020026 | | |
| 226 | 84146 | ZNF644 | intron_04 | chr1: | chr1: | UGACAAAUACAAACAGCAAU | + |
| | | | | 90982371- | 91020001- | | |
| | | | | 91020447 | 91020020 | | |
| 227 | 84146 | ZNF644 | intron_04 | chr1: | chr1: | GUUUGUAUUUGUCAUAUUGC | |
| | | | | 90982371- | 91019995- | | |
| | | | | 91020447 | 91020014 | | |
| 228 | 84146 | ZNF644 | intron_04 | chr1: | chr1: | UAAGUUAAAAACUUUCAUAU | − |
| | | | | 90982371- | 91019866- | | |
| | | | | 91020447 | 91019885 | | |
| 229 | 84146 | ZNF644 | intron_04 | chr1: | chr1: | UUCUGGGUCAAGACUGCAUU | + |
| | | | | 90982371- | 91019427- | | |
| | | | | 91020447 | 91019446 | | |
| 230 | 84146 | ZNF644 | intron_04 | chr1: | chr1: | GUUAUUGCCAGUUAUUAUGU | − |
| | | | | 90982371- | 91019341- | | |
| | | | | 91020447 | 91019360 | | |
| 231 | 84146 | ZNF644 | intron_04 | chr1: | chr1: | AGACUACUACUUCUACUGAG | − |
| | | | | 90982371- | 91019203- | | |
| | | | | 91020447 | 91019222 | | |
| 232 | 84146 | ZNF644 | intron_04 | chr1: | chr1: | UCUACUGAGUGGUACCUCUA | − |
| | | | | 90982371- | 91019192- | | |
| | | | | 91020447 | 91019211 | | |
| 233 | 84146 | ZNF644 | intron_04 | chr1: | chr1: | UGGUACCUCUAAGGUCUGUU | − |
| | | | | 90982371- | 91019183- | | |
| | | | | 91020447 | 91019202 | | |
| 234 | 84146 | ZNF644 | intron_04 | chr1: | chr1: | CAAGUAGUGACAGUCAUUUA | − |
| | | | | 90982371- | 91019152- | | |
| | | | | 91020447 | 91019171 | | |
| 235 | 84146 | ZNF644 | intron_04 | chr1: | chr1: | GUAGUGACAGUCAUUUAUGG | − |
| | | | | 90982371- | 91019149- | | |
| | | | | 91020447 | 91019168 | | |
| 236 | 84146 | ZNF644 | intron_04 | chr1: | chr1: | UGAAAAUUAGAGUCACUUUC | − |
| | | | | 90982371- | 91018943- | | |
| | | | | 91020447 | 91018962 | | |
| 237 | 84146 | ZNF644 | intron_04 | chr1: | chr1: | GGAAAAUGUUUAAGGUUGGC | + |
| | | | | 90982371- | 91018889- | | |
| | | | | 91020447 | 91018908 | | |
| 238 | 84146 | ZNF644 | intron_04 | chr1: | chr1: | AACUGGAAAAUGUUUAAGGU | + |
| | | | | 90982371- | 91018885- | | |
| | | | | 91020447 | 91018904 | | |
| 239 | 84146 | ZNF644 | intron_04 | chr1: | chr1: | CUUGAAUGACAAACUAAAAC | + |
| | | | | 90982371- | 91018868- | | |
| | | | | 91020447 | 91018887 | | |
| 240 | 84146 | ZNF644 | intron_04 | chr1: | chr1: | UGAGACUGUUAAUGGGUAGC | − |
| | | | | 90982371- | 91018825- | | |
| | | | | 91020447 | 91018844 | | |
| 241 | 84146 | ZNF644 | intron_04 | chr1: | chr1: | UUCAAAGAGAAUAGAAGUGG | − |
| | | | | 90982371- | 91018787- | | |
| | | | | 91020447 | 91018806 | | |
| 242 | 84146 | ZNF644 | intron_04 | chr1: | chr1: | GGAAAAGUGAAUCUUAUUCU | |
| | | | | 90982371- | 91018656- | | |
| | | | | 91020447 | 91018675 | | |
| 243 | 84146 | ZNF644 | intron_04 | chr1: | chr1: | CAAUUGUAGCUUGCAGCAAA | − |
| | | | | 90982371- | 91018607- | | |
| | | | | 91020447 | 91018626 | | |
| 244 | 84146 | ZNF644 | intron_04 | chr1: | chr1: | GAGUGGAUACUGUAAUACUA | − |
| | | | | 90982371- | 91018465- | | |
| | | | | 91020447 | 91018484 | | |
| 245 | 84146 | ZNF644 | intron_04 | chr1: | chr1: | AGAAGUGGUGUUUUUGAUUC | − |
| | | | | 90982371- | 91018313- | | |
| | | | | 91020447 | 91018332 | | |
| 246 | 84146 | ZNF644 | intron_04 | chr1: | chr1: | UUUUGAUUCAGGUUUAUUAG | − |
| | | | | 90982371- | 91018302- | | |
| | | | | 91020447 | 91018321 | | |
| 247 | 84146 | ZNF644 | intron_04 | chr1: | chr1: | UUUGAUUCAGGUUUAUUAGA | − |
| | | | | 90982371- | 91018301- | | |
| | | | | 91020447 | 91018320 | | |
| 248 | 84146 | ZNF644 | intron_04 | chr1: | chr1: | UCAAAUCUCCCAAAACUCAA | + |
| | | | | 90982371- | 91018237- | | |
| | | | | 91020447 | 91018256 | | |
| 249 | 84146 | ZNF644 | intron_04 | chr1: | chr1: | UUUGGGAGAUUUGAGAAUCA | − |
| | | | | 90982371- | 91018231- | | |
| | | | | 91020447 | 91018250 | | |
| 250 | 84146 | ZNF644 | intron_04 | chr1: | chr1: | CUAGCACUAGCUCACCCUGC | − |
| | | | | 90982371- | 91018200- | | |
| | | | | 91020447 | 91018219 | | |
| 251 | 84146 | ZNF644 | intron_04 | chr1: | chr1: | AAUCUUUUAGCCAACCAGCA | + |
| | | | | 90982371- | 91018183- | | |
| | | | | 91020447 | 91018202 | | |
| 252 | 84146 | ZNF644 | intron_04 | chr1: | chr1: | AUCUUCAUGUUUGUUUCUUA | + |
| | | | | 90982371- | 91018149- | | |
| | | | | 91020447 | 91018168 | | |
| 253 | 84146 | ZNF644 | intron_04 | chr1: | chr1: | UUAGAGUCUUACUACCCUCU | + |
| | | | | 90982371- | 91018117- | | |
| | | | | 91020447 | 91018136 | | |
| 254 | 84146 | ZNF644 | intron_04 | chr1: | chr1: | UUUAGAGUCUUACUACCCUC | + |
| | | | | 90982371- | 91018116- | | |
| | | | | 91020447 | 91018135 | | |
| 255 | 84146 | ZNF644 | intron_04 | chr1: | chr1: | AGUAACUCCAUGGUUCAACU | + |
| | | | | 90982371- | 91017991- | | |
| | | | | 91020447 | 91018010 | | |
| 256 | 84146 | ZNF644 | intron_04 | chr1: | chr1: | AAAGGAUAGUAACUACUGCC | + |
| | | | | 90982371- | 91017664- | | |
| | | | | 91020447 | 91017683 | | |
| 257 | 84146 | ZNF644 | intron_04 | chr1: | chr1: | ACUAUCCUUUUUGAACUUCC | − |
| | | | | 90982371- | 91017654- | | |
| | | | | 91020447 | 91017673 | | |
| 258 | 84146 | ZNF644 | intron_04 | chr1: | chr1: | UGGGAACUCUUAUGUGAUUA | − |
| | | | | 90982371- | 91017634- | | |
| | | | | 91020447 | 91017653 | | |
| 259 | 84146 | ZNF644 | intron_04 | chr1: | chr1: | GCUGCUACUUCUGCCCUGGC | + |
| | | | | 90982371- | 91017465- | | |
| | | | | 91020447 | 91017484 | | |
| 260 | 84146 | ZNF644 | intron_04 | chr1: | chr1: | AGUGCACACUUCUCUUGGUU | − |
| | | | | 90982371- | 91017445- | | |
| | | | | 91020447 | 91017464 | | |
| 261 | 84146 | ZNF644 | intron_04 | chr1: | chr1: | UGGAUUAAGAUUAGCGUUUC | − |
| | | | | 90982371- | 91017410- | | |
| | | | | 91020447 | 91017429 | | |
| 262 | 84146 | ZNF644 | intron_04 | chr1: | chr1: | GGAUUAAGAUUAGCGUUUCU | − |
| | | | | 90982371- | 91017409- | | |
| | | | | 91020447 | 91017428 | | |
| 263 | 84146 | ZNF644 | intron_04 | chr1: | chr1: | AGGGCCAAGAUUAGUAGGAG | + |
| | | | | 90982371- | 91017370- | | |
| | | | | 91020447 | 91017389 | | |
| 264 | 84146 | ZNF644 | intron_04 | chr1: | chr1: | GAGGUAGGGCCAAGAUUAGU | + |
| | | | | 90982371- | 91017365- | | |
| | | | | 91020447 | 91017384 | | |
| 265 | 84146 | ZNF644 | intron_04 | chr1: | chr1: | AGCUAGCAGACAGAAGAGGU | + |
| | | | | 90982371- | 91017350- | | |
| | | | | 91020447 | 91017369 | | |
| 266 | 84146 | ZNF644 | intron_04 | chr1: | chr1: | CCACAGCUAGCAGACAGAAG | + |
| | | | | 90982371- | 91017346- | | |
| | | | | 91020447 | 91017365 | | |
| 267 | 84146 | ZNF644 | intron_04 | chr1: | chr1: | UGUGGUCUUCCCAUUUCAUU | − |
| | | | | 90982371- | 91017331- | | |
| | | | | 91020447 | 91017350 | | |
| 268 | 84146 | ZNF644 | intron_04 | chr1: | chr1: | AUUUUGGUAGAAUUGAAGCU | − |
| | | | | 90982371- | 91017230- | | |
| | | | | 91020447 | 91017249 | | |
| 269 | 84146 | ZNF644 | intron_04 | chr1: | chr1: | AAGCUGGGUUAGAGUGAUGA | − |
| | | | | 90982371- | 91017215- | | |
| | | | | 91020447 | 91017234 | | |
| 270 | 84146 | ZNF644 | intron_04 | chr1: | chr1: | UUAAUUUUCAGUUGUCUAUU | + |
| | | | | 90982371- | 91016777- | | |
| | | | | 91020447 | 91016796 | | |
| 271 | 84146 | ZNF644 | intron_04 | chr1: | chr1: | CCCCUCUCCUCCCCAAUAAA | + |
| | | | | 90982371- | 91016230- | | |
| | | | | 91020447 | 91016249 | | |
| 272 | 84146 | ZNF644 | intron_04 | chr1: | chr1: | CACCAUUUAUUGGGGAGGAG | − |
| | | | | 90982371- | 91016235- | | |
| | | | | 91020447 | 91016254 | | |
| 273 | 84146 | ZNF644 | intron_04 | chr1: | chr1: | ACCAUUUAUUGGGGAGGAGA | − |
| | | | | 90982371- | 91016234- | | |
| | | | | 91020447 | 91016253 | | |
| 274 | 84146 | ZNF644 | intron_04 | chr1: | chr1: | UUAUUGUUGGUUUGUGAAGG | − |
| | | | | 90982371- | 91016199- | | |
| | | | | 91020447 | 91016218 | | |
| 275 | 84146 | ZNF644 | intron_04 | chr1: | chr1: | UAUUGUUGGUUUGUGAAGGU | − |
| | | | | 90982371- | 91016198- | | |
| | | | | 91020447 | 91016217 | | |
| 276 | 84146 | ZNF644 | intron_04 | chr1: | chr1: | GUAAUUAUGCAUAUAUAAAG | − |
| | | | | 90982371- | 91016072- | | |
| | | | | 91020447 | 91016091 | | |
| 277 | 84146 | ZNF644 | intron_04 | chr1: | chr1: | UUAUGCAUAUAUAAAGAGGC | − |
| | | | | 90982371- | 91016068- | | |
| | | | | 91020447 | 91016087 | | |
| 278 | 84146 | ZNF644 | intron_04 | chr1: | chr1: | AGCCUUGAAGUAAAAUUGAC | − |
| | | | | 90982371- | 91016022- | | |
| | | | | 91020447 | 91016041 | | |
| 279 | 84146 | ZNF644 | intron_04 | chr1: | chr1: | GAUUUAGCUGUGUGAGCACU | − |
| | | | | 90982371- | 91015994- | | |
| | | | | 91020447 | 91016013 | | |
| 280 | 84146 | ZNF644 | intron_04 | chr1: | chr1: | AUAACUAUUAUUACUCUAAC | + |
| | | | | 90982371- | 91015859- | | |
| | | | | 91020447 | 91015878 | | |
| 281 | 84146 | ZNF644 | intron_04 | chr1: | chr1: | CAACCUUGUCUUUAUCGGCA | + |
| | | | | 90982371- | 91015740- | | |
| | | | | 91020447 | 91015759 | | |
| 282 | 84146 | ZNF644 | intron_04 | chr1: | chr1: | UAUAACAACCUUGUCUUUAU | + |
| | | | | 90982371- | 91015735- | | |
| | | | | 91020447 | 91015754 | | |
| 283 | 84146 | ZNF644 | intron_04 | chr1: | chr1: | AAGCCAUGCCGAUAAAGACA | − |
| | | | | 90982371- | 91015746- | | |
| | | | | 91020447 | 91015765 | | |
| 284 | 84146 | ZNF644 | intron_04 | chr1: | chr1: | AGCAGCAGAAUCUUAUAACC | − |
| | | | | 90982371- | 91015671- | | |
| | | | | 91020447 | 91015690 | | |
| 285 | 84146 | ZNF644 | intron_04 | chr1: | chr1: | ACUCAUCUGCUGACAGUGCU | + |
| | | | | 90982371- | 91015623- | | |
| | | | | 91020447 | 91015642 | | |
| 286 | 84146 | ZNF644 | intron_04 | chr1: | chr1: | AGCAGAUGAGUAGAUACACU | − |
| | | | | 90982371- | 91015614- | | |
| | | | | 91020447 | 91015633 | | |
| 287 | 84146 | ZNF644 | intron_04 | chr1: | chr1: | GACAAACCAAUGCACUGGCU | + |
| | | | | 90982371- | 91015560- | | |
| | | | | 91020447 | 91015579 | | |
| 288 | 84146 | ZNF644 | intron_04 | chr1: | chr1: | CCACUCCUCACUCUCAUCUU | + |
| | | | | 90982371- | 91015416- | | |
| | | | | 91020447 | 91015435 | | |
| 289 | 84146 | ZNF644 | intron_04 | chr1: | chr1: | GCUGGUAGGUAGCUAGAUUG | − |
| | | | | 90982371- | 91015397- | | |
| | | | | 91020447 | 91015416 | | |
| 290 | 84146 | ZNF644 | intron_04 | chr1: | chr1: | GGUAGGUAGCUAGAUUGAGG | − |
| | | | | 90982371- | 91015394- | | |
| | | | | 91020447 | 91015413 | | |
| 291 | 84146 | ZNF644 | intron_04 | chr1: | chr1: | GGUAGCUAGAUUGAGGCGGG | − |
| | | | | 90982371- | 91015390- | | |
| | | | | 91020447 | 91015409 | | |
| 292 | 84146 | ZNF644 | intron_04 | chr1: | chr1: | AAAUCCGUGUUUGUGCUAGG | + |
| | | | | 90982371- | 91015206- | | |
| | | | | 91020447 | 91015225 | | |
| 293 | 84146 | ZNF644 | intron_04 | chr1: | chr1: | ACCUCCUCCUAGCACAAACA | − |
| | | | | 90982371- | 91015213- | | |
| | | | | 91020447 | 91015232 | | |
| 294 | 84146 | ZNF644 | intron_04 | chr1: | chr1: | CAGCUAGUAAAAAUAAUUUU | − |
| | | | | 90982371- | 91015159- | | |
| | | | | 91020447 | 91015178 | | |
| 295 | 84146 | ZNF644 | intron_04 | chr1: | chr1: | GAUAUACCUAGGUUCAAACU | + |
| | | | | 90982371- | 91014895- | | |
| | | | | 91020447 | 91014914 | | |
| 296 | 84146 | ZNF644 | intron_04 | chr1: | chr1: | GACCUUCUCAAGAUAUACCU | + |
| | | | | 90982371- | 91014884- | | |
| | | | | 91020447 | 91014903 | | |
| 297 | 84146 | ZNF644 | intron_04 | chr1: | chr1: | GAUAUAUAUGUAAGAAGAAC | + |
| | | | | 90982371- | 91014833- | | |
| | | | | 91020447 | 91014852 | | |
| 298 | 84146 | ZNF644 | intron_04 | chr1: | chr1: | CACCACUUGAAAUAAGGGGG | + |
| | | | | 90982371- | 91014734- | | |
| | | | | 91020447 | 91014753 | | |
| 299 | 84146 | ZNF644 | intron_04 | chr1: | chr1: | ACACCACUUGAAAUAAGGGG | + |
| | | | | 90982371- | 91014733- | | |
| | | | | 91020447 | 91014752 | | |
| 300 | 84146 | ZNF644 | intron_04 | chr1: | chr1: | GACACCACUUGAAAUAAGGG | + |
| | | | | 90982371- | 91014732- | | |
| | | | | 91020447 | 91014751 | | |
| 301 | 84146 | ZNF644 | intron_04 | chr1: | chr1: | CGACACCACUUGAAAUAAGG | + |
| | | | | 90982371- | 91014731- | | |
| | | | | 91020447 | 91014750 | | |
| 302 | 84146 | ZNF644 | intron_04 | chr1: | chr1: | ACGACACCACUUGAAAUAAG | + |
| | | | | 90982371- | 91014730- | | |
| | | | | 91020447 | 91014749 | | |
| 303 | 84146 | ZNF644 | intron_04 | chr1: | chr1: | UACGACACCACUUGAAAUAA | + |
| | | | | 90982371- | 91014729- | | |
| | | | | 91020447 | 91014748 | | |
| 304 | 84146 | ZNF644 | intron_04 | chr1: | chr1: | AUACGACACCACUUGAAAUA | + |
| | | | | 90982371- | 91014728- | | |
| | | | | 91020447 | 91014747 | | |
| 305 | 84146 | ZNF644 | intron_04 | chr1: | chr1: | CUCCCCCCCCUUAUUUCAAG | − |
| | | | | 90982371- | 91014739- | | |
| | | | | 91020447 | 91014758 | | |
| 306 | 84146 | ZNF644 | intron_04 | chr1: | chr1: | CUAUUCAUACCACCAUAUAA | − |
| | | | | 90982371- | 91014696- | | |
| | | | | 91020447 | 91014715 | | |
| 307 | 84146 | ZNF644 | intron_04 | chr1: | chr1: | CAUAUAAAGGCUCUUUGUCU | − |
| | | | | 90982371- | 91014683- | | |
| | | | | 91020447 | 91014702 | | |
| 308 | 84146 | ZNF644 | intron_04 | chr1: | chr1: | GUAAAGGGCAGCAUCCAUUU | + |
| | | | | 90982371- | 91014629- | | |
| | | | | 91020447 | 91014648 | | |
| 309 | 84146 | ZNF644 | intron_04 | chr1: | chr1: | AUCAUGCUAUCUAUCCUUGC | − |
| | | | | 90982371- | 91014535- | | |
| | | | | 91020447 | 91014554 | | |
| 310 | 84146 | ZNF644 | intron_04 | chr1: | chr1: | AAAAGCUUAAUGUUGAAUUC | − |
| | | | | 90982371- | 91014304- | | |
| | | | | 91020447 | 91014323 | | |
| 311 | 84146 | ZNF644 | intron_04 | chr1: | chr1: | UGUUGAAUUCUGGCACUCAU | − |
| | | | | 90982371- | 91014294- | | |
| | | | | 91020447 | 91014313 | | |
| 312 | 84146 | ZNF644 | intron_04 | chr1: | chr1: | GUUGAAUUCUGGCACUCAUC | − |
| | | | | 90982371- | 91014293- | | |
| | | | | 91020447 | 91014312 | | |
| 313 | 84146 | ZNF644 | intron_04 | chr1: | chr1: | UUACAGAUAGUAAGUCCUAU | − |
| | | | | 90982371- | 91013685- | | |
| | | | | 91020447 | 91013704 | | |
| 314 | 84146 | ZNF644 | intron_04 | chr1: | chr1: | UACAGAUAGUAAGUCCUAUG | − |
| | | | | 90982371- | 91013684- | | |
| | | | | 91020447 | 91013703 | | |
| 315 | 84146 | ZNF644 | intron_04 | chr1: | chr1: | AUUCUUUCCCUAUACCCCAU | + |
| | | | | 90982371- | 91013667- | | |
| | | | | 91020447 | 91013686 | | |
| 316 | 84146 | ZNF644 | intron_04 | chr1: | chr1: | UAGUAAGUCCUAUGGGGUAU | − |
| | | | | 90982371- | 91013678- | | |
| | | | | 91020447 | 91013697 | | |
| 317 | 84146 | ZNF644 | intron_04 | chr1: | chr1: | AGUAAGUCCUAUGGGGUAUA | − |
| | | | | 90982371- | 91013677- | | |
| | | | | 91020447 | 91013696 | | |
| 318 | 84146 | ZNF644 | intron_04 | chr1: | chr1: | AGCAAAUACAGUUUGAUACC | − |
| | | | | 90982371- | 91013555- | | |
| | | | | 91020447 | 91013574 | | |
| 319 | 84146 | ZNF644 | intron_04 | chr1: | chr1: | AUUCAAGCCACUCUAUUACC | + |
| | | | | 90982371- | 91013534- | | |
| | | | | 91020447 | 91013553 | | |
| 320 | 84146 | ZNF644 | intron_04 | chr1: | chr1: | GAGUGGCUUGAAUCCAGUUU | − |
| | | | | 90982371- | 91013527- | | |
| | | | | 91020447 | 91013546 | | |
| 321 | 84146 | ZNF644 | intron_04 | chr1: | chr1: | UCAUGUAUGAGACACGAAUU | + |
| | | | | 90982371- | 91013397- | | |
| | | | | 91020447 | 91013416 | | |
| 322 | 84146 | ZNF644 | intron_04 | chr1: | chr1: | UAUGACACUACAGAAAAUGC | − |
| | | | | 90982371- | 91013019- | | |
| | | | | 91020447 | 91013038 | | |
| 323 | 84146 | ZNF644 | intron_04 | chr1: | chr1: | UUCCCUUUUGAAGAUCGACU | + |
| | | | | 90982371- | 91012974- | | |
| | | | | 91020447 | 91012993 | | |
| 324 | 84146 | ZNF644 | intron_04 | chr1: | chr1: | AAGCCUAGUCGAUCUUCAAA | − |
| | | | | 90982371- | 91012980- | | |
| | | | | 91020447 | 91012999 | | |
| 325 | 84146 | ZNF644 | intron_04 | chr1: | chr1: | AGCCUAGUCGAUCUUCAAAA | − |
| | | | | 90982371- | 91012979- | | |
| | | | | 91020447 | 91012998 | | |
| 326 | 84146 | ZNF644 | intron_04 | chr1: | chr1: | UUCUGUGAUUAACAAUAUGA | − |
| | | | | 90982371- | 91012928- | | |
| | | | | 91020447 | 91012947 | | |
| 327 | 84146 | ZNF644 | intron_04 | chr1: | chr1: | CCACUACCUGGGAGUUACCU | + |
| | | | | 90982371- | 91012752- | | |
| | | | | 91020447 | 91012771 | | |
| 328 | 84146 | ZNF644 | intron_04 | chr1: | chr1: | CCCAGUACCUCCCACUACCU | + |
| | | | | 90982371- | 91012741- | | |
| | | | | 91020447 | 91012760 | | |
| 329 | 84146 | ZNF644 | intron_04 | chr1: | chr1: | ACCCAGUACCUCCCACUACC | + |
| | | | | 90982371- | 91012740- | | |
| | | | | 91020447 | 91012759 | | |
| 330 | 84146 | ZNF644 | intron_04 | chr1: | chr1: | GGAGGUACUGGGUUACACCU | − |
| | | | | 90982371- | 91012733- | | |
| | | | | 91020447 | 91012752 | | |
| 331 | 84146 | ZNF644 | intron_04 | chr1: | chr1: | GAGGUACUGGGUUACACCUG | − |
| | | | | 90982371- | 91012732- | | |
| | | | | 91020447 | 91012751 | | |
| 332 | 84146 | ZNF644 | intron_04 | chr1: | chr1: | GGGUUACACCUGGGGAGAAG | − |
| | | | | 90982371- | 91012724- | | |
| | | | | 91020447 | 91012743 | | |
| 333 | 84146 | ZNF644 | intron_04 | chr1: | chr1: | AAUUAAUAGGAGGGAGCACA | + |
| | | | | 90982371- | 91012578- | | |
| | | | | 91020447 | 91012597 | | |
| 334 | 84146 | ZNF644 | intron_04 | chr1: | chr1: | GUAGGGAGAAAUUAAUAGGA | + |
| | | | | 90982371- | 91012569- | | |
| | | | | 91020447 | 91012588 | | |
| 335 | 84146 | ZNF644 | intron_04 | chr1: | chr1: | UUCUGUAGGGAGAAAUUAAU | + |
| | | | | 90982371- | 91012565- | | |
| | | | | 91020447 | 91012584 | | |
| 336 | 84146 | ZNF644 | intron_04 | chr1: | chr1: | GAGGUUAGAGGUUAAAAUAG | + |
| | | | | 90982371- | 91012538- | | |
| | | | | 91020447 | 91012557 | | |
| 337 | 84146 | ZNF644 | intron_04 | chr1: | chr1: | CAAUUCUCACUACCCUUGGG | + |
| | | | | 90982371- | 91012209- | | |
| | | | | 91020447 | 91012228 | | |
| 338 | 84146 | ZNF644 | intron_04 | chr1: | chr1: | UGUUUGGCAUUGUUAUGAAU | − |
| | | | | 90982371- | 91012156- | | |
| | | | | 91020447 | 91012175 | | |
| 339 | 84146 | ZNF644 | intron_04 | chr1: | chr1: | GAGGUAAAUCAGGUGAUAUU | − |
| | | | | 90982371- | 91012133- | | |
| | | | | 91020447 | 91012152 | | |
| 340 | 84146 | ZNF644 | intron_04 | chr1: | chr1: | UCAGGUGAUAUUUGGUACUA | − |
| | | | | 90982371- | 91012125- | | |
| | | | | 91020447 | 91012144 | | |
| 341 | 84146 | ZNF644 | intron_04 | chr1: | chr1: | CUCUCUGAUUUUGUCACUGG | + |
| | | | | 90982371- | 91012089- | | |
| | | | | 91020447 | 91012108 | | |
| 342 | 84146 | ZNF644 | intron_04 | chr1: | chr1: | ACCUCUCUGAUUUUGUCACU | + |
| | | | | 90982371- | 91012087- | | |
| | | | | 91020447 | 91012106 | | |
| 343 | 84146 | ZNF644 | intron_04 | chr1: | chr1: | CAUUAAUAGUAAUCCUUUAG | − |
| | | | | 90982371- | 91012054- | | |
| | | | | 91020447 | 91012073 | | |
| 344 | 84146 | ZNF64 | intron_04 | chr1: | chr1: | GUCAUAAAACUAACCUCUAA | + |
| | | | | 90982371- | 91012038- | | |
| | | | | 91020447 | 91012057 | | |
| 345 | 84146 | ZNF644 | intron_04 | chr1: | chr1: | GGCAACUAUGUUAUCGGUGG | + |
| | | | | 90982371- | 91011979- | | |
| | | | | 91020447 | 91011998 | | |
| 346 | 84146 | ZNF644 | intron_04 | chr1: | chr1: | CCAGGCAACUAUGUUAUCGG | + |
| | | | | 90982371- | 91011976- | | |
| | | | | 91020447 | 91011995 | | |
| 347 | 84146 | ZNF644 | intron_04 | chr1: | chr1: | AAGCCAGGCAACUAUGUUAU | + |
| | | | | 90982371- | 91011973- | | |
| | | | | 91020447 | 91011992 | | |
| 348 | 84146 | ZNF644 | intron_04 | chr1: | chr1: | CCACCGAUAACAUAGUUGCC | − |
| | | | | 90982371- | 91011979- | | |
| | | | | 91020447 | 91011998 | | |
| 349 | 84146 | ZNF644 | intron_04 | chr1: | chr1: | UAUUCUCUAGGCAUAUAGCC | − |
| | | | | 90982371- | 91011940- | | |
| | | | | 91020447 | 91011959 | | |
| 350 | 84146 | ZNF644 | intron_04 | chr1: | chr1: | AACUUCCUCCACCUACUUCC | + |
| | | | | 90982371- | 91011919- | | |
| | | | | 91020447 | 91011938 | | |
| 351 | 84146 | ZNF644 | intron_04 | chr1: | chr1: | UAGGCAUAUAGCCAGGAAGU | − |
| | | | | 90982371- | 91011933- | | |
| | | | | 91020447 | 91011952 | | |
| 352 | 84146 | ZNF644 | intron_04 | chr1: | chr1: | GCAUAUAGCCAGGAAGUAGG | − |
| | | | | 90982371- | 91011930- | | |
| | | | | 91020447 | 91011949 | | |
| 353 | 84146 | ZNF644 | intron_04 | chr1: | chr1: | UAUAGCCAGGAAGUAGGUGG | − |
| | | | | 90982371- | 91011927- | | |
| | | | | 91020447 | 91011946 | | |
| 354 | 84146 | ZNF644 | intron_04 | chr1: | chr1: | CUCCAAAAACCAUCUAUAUA | + |
| | | | | 90982371- | 91011885- | | |
| | | | | 91020447 | 91011904 | | |
| 355 | 84146 | ZNF644 | intron_04 | chr1: | chr1: | GGAUUGCCUCCUUAUAUAGA | − |
| | | | | 90982371- | 91011897- | | |
| | | | | 91020447 | 91011916 | | |
| 356 | 84146 | ZNF644 | intron_04 | chr1: | chr1: | CCUCUUUGAUGGUAGCUUCC | − |
| | | | | 90982371- | 91011865- | | |
| | | | | 91020447 | 91011884 | | |
| 357 | 84146 | ZNF644 | intron_04 | chr1: | chr1: | UAGCUAACUGACAUAAUGCC | + |
| | | | | 90982371- | 91011844- | | |
| | | | | 91020447 | 91011863 | | |
| 358 | 84146 | ZNF644 | intron_04 | chr1: | chr1: | CAUUAUGUCAGUUAGCUAUU | − |
| | | | | 90982371- | 91011842- | | |
| | | | | 91020447 | 91011861 | | |
| 359 | 84146 | ZNF644 | intron_04 | chr1: | chr1: | AGUUAGCUAUUAGGCAUUUU | − |
| | | | | 90982371- | 91011833- | | |
| | | | | 91020447 | 91011852 | | |
| 360 | 84146 | ZNF644 | intron_04 | chr1: | chr1: | GCAUUUUAGGUUGCUUAUUA | − |
| | | | | 90982371- | 91011820- | | |
| | | | | 91020447 | 91011839 | | |
| 361 | 84146 | ZNF644 | intron_04 | chr1: | chr1: | AGGUUGCUUAUUAAGGUAUU | − |
| | | | | 90982371- | 91011813- | | |
| | | | | 91020447 | 91011832 | | |
| 362 | 84146 | ZNF644 | intron_04 | chr1: | chr1: | GGUUGCUUAUUAAGGUAUUU | − |
| | | | | 90982371- | 91011812- | | |
| | | | | 91020447 | 91011831 | | |
| 363 | 84146 | ZNF644 | intron_04 | chr1: | chr1: | CUGAUUGUAAUUUUAGAGGU | − |
| | | | | 90982371- | 91011784- | | |
| | | | | 91020447 | 91011803 | | |
| 364 | 84146 | ZNF644 | intron_04 | chr1: | chr1: | UUUUAGAGGUAGGAAUAAAU | − |
| | | | | 90982371- | 91011774- | | |
| | | | | 91020447 | 91011793 | | |
| 365 | 84146 | ZNF644 | intron_04 | chr1: | chr1: | CUUGUAAGCAACUGUCCAUA | + |
| | | | | 90982371- | 91011681- | | |
| | | | | 91020447 | 91011700 | | |
| 366 | 84146 | ZNF644 | intron_04 | chr1: | chr1: | CAGUUGCUUACAAGUGUGAA | − |
| | | | | 90982371- | 91011675- | | |
| | | | | 91020447 | 91011694 | | |
| 367 | 84146 | ZNF644 | intron_04 | chr1: | chr1: | UGAAUGGUUAAAGCCCAUGU | − |
| | | | | 90982371- | 91011659- | | |
| | | | | 91020447 | 91011678 | | |
| 368 | 84146 | ZNF644 | intron_04 | chr1: | chr1: | CAACUAUUAAUUCCAUUUGG | + |
| | | | | 90982371- | 91011558- | | |
| | | | | 91020447 | 91011577 | | |
| 369 | 84146 | ZNF644 | intron_04 | chr1: | chr1: | ACAACUAUUAAUUCCAUUUG | + |
| | | | | 90982371- | 91011557- | | |
| | | | | 91020447 | 91011576 | | |
| 370 | 84146 | ZNF644 | intron_04 | chr1: | chr1: | GUAGUAUAGCAGUAUUAAAU | − |
| | | | | 90982371- | 91011496- | | |
| | | | | 91020447 | 91011515 | | |
| 371 | 84146 | ZNF644 | intron_04 | chr1: | chr1: | AUAUGUAAAUUGCGCAGAAA | − |
| | | | | 90982371- | 91011365- | | |
| | | | | 91020447 | 91011384 | | |
| 372 | 84146 | ZNF644 | intron_04 | chr1: | chr1: | AUUUAAUAUACUCUUGCUCC | − |
| | | | | 90982371- | 91011232- | | |
| | | | | 91020447 | 91011251 | | |
| 373 | 84146 | ZNF644 | intron_04 | chr1: | chr1: | CUUUACACAUAACAGCUUUU | − |
| | | | | 90982371- | 91011062- | | |
| | | | | 91020447 | 91011081 | | |
| 374 | 84146 | ZNF644 | intron_04 | chr1: | chr1: | UUACACAUAACAGCUUUUGG | − |
| | | | | 90982371- | 91011060- | | |
| | | | | 91020447 | 91011079 | | |
| 375 | 84146 | ZNF644 | intron_04 | chr1: | chr1: | UCAGAAAAGUCUUGUUUGUC | − |
| | | | | 90982371- | 91010862- | | |
| | | | | 91020447 | 91010881 | | |
| 376 | 84146 | ZNF644 | intron_04 | chr1: | chr1: | AUUCAGCUAAUGCUCCACUA | − |
| | | | | 90982371- | 91010783- | | |
| | | | | 91020447 | 91010802 | | |
| 377 | 84146 | ZNF644 | intron_04 | chr1: | chr1: | UUCAGCUAAUGCUCCACUAG | − |
| | | | | 90982371- | 91010782- | | |
| | | | | 91020447 | 91010801 | | |
| 378 | 84146 | ZNF644 | intron_04 | chr1: | chr1: | GCUAAUGCUCCACUAGGGGU | − |
| | | | | 90982371- | 91010778- | | |
| | | | | 91020447 | 91010797 | | |
| 379 | 84146 | ZNF644 | intron_04 | chr1: | chr1: | CUAAUGCUCCACUAGGGGUA | − |
| | | | | 90982371- | 91010777- | | |
| | | | | 91020447 | 91010796 | | |
| 380 | 84146 | ZNF644 | intron_04 | chr1: | chr1: | AUCUUAGAUCAUGAGCUCUU | + |
| | | | | 90982371- | 91010716- | | |
| | | | | 91020447 | 91010735 | | |
| 381 | 84146 | ZNF644 | intron_04 | chr1: | chr1: | AAUAAGAUUGUGGCAUGAGC | − |
| | | | | 90982371- | 91010141- | | |
| | | | | 91020447 | 91010160 | | |
| 382 | 84146 | ZNF644 | intron_04 | chr1: | chr1: | CCCUCCAAUCACGCUGUAUC | + |
| | | | | 90982371- | 91010023- | | |
| | | | | 91020447 | 91010042 | | |
| 383 | 84146 | ZNF644 | intron_04 | chr1: | chr1: | GCAGCCAGAUACAGCGUGAU | − |
| | | | | 90982371- | 91010030- | | |
| | | | | 91020447 | 91010049 | | |
| 384 | 84146 | ZNF644 | intron_04 | chr1: | chr1: | GCCAGAUACAGCGUGAUUGG | − |
| | | | | 90982371- | 91010027- | | |
| | | | | 91020447 | 91010046 | | |
| 385 | 84146 | ZNF644 | intron_04 | chr1: | chr1: | CCAGAUACAGCGUGAUUGGA | − |
| | | | | 90982371- | 91010026- | | |
| | | | | 91020447 | 91010045 | | |
| 386 | 84146 | ZNF644 | intron_04 | chr1: | chr1: | UAUUAUCUUUGUGAGUGGGA | − |
| | | | | 90982371- | 91009973- | | |
| | | | | 91020447 | 91009992 | | |
| 387 | 84146 | ZNF644 | intron_04 | chr1: | chr1: | GGAAGGGUAUAUUAAGAGUA | − |
| | | | | 90982371- | 91009956- | | |
| | | | | 91020447 | 91009975 | | |
| 388 | 84146 | ZNF644 | intron_04 | chr1: | chr1: | UAGCUCUGCACUACAAACUG | + |
| | | | | 90982371- | 91009891- | | |
| | | | | 91020447 | 91009910 | | |
| 389 | 84146 | ZNF644 | intron_04 | chr1: | chr1: | UGACUUACUAGCACUAAUUG | − |
| | | | | 90982371- | 91009806- | | |
| | | | | 91020447 | 91009825 | | |
| 390 | 84146 | ZNF644 | intron_04 | chr1: | chr1: | UUAUAAUGUCUCUUAAGCCA | + |
| | | | | 90982371- | 91009607- | | |
| | | | | 91020447 | 91009626 | | |
| 391 | 84146 | ZNF644 | intron_04 | chr1: | chr1: | AUUAUAAUUUGUAUUGGAGC | − |
| | | | | 90982371- | 91009594- | | |
| | | | | 91020447 | 91009613 | | |
| 392 | 84146 | ZNF644 | intron_04 | chr1: | chr1: | AUUGGAGCUGGCAGGAAAAC | − |
| | | | | 90982371- | 91009582- | | |
| | | | | 91020447 | 91009601 | | |
| 393 | 84146 | ZNF644 | intron_04 | chr1: | chr1: | UGGGAAUACUCUGCUUUUAU | − |
| | | | | 90982371- | 91009479- | | |
| | | | | 91020447 | 91009498 | | |
| 394 | 84146 | ZNF644 | intron_04 | chr1: | chr1: | CCAUAAGGUACACUCAAUUU | + |
| | | | | 90982371- | 91009416- | | |
| | | | | 91020447 | 91009435 | | |
| 395 | 84146 | ZNF644 | intron_04 | chr1: | chr1: | CCUAAAUUGAGUGUACCUUA | − |
| | | | | 90982371- | 91009419- | | |
| | | | | 91020447 | 91009438 | | |
| 396 | 84146 | ZNF644 | intron_04 | chr1: | chr1: | UUUACCCAUAAUAAACCAUA | + |
| | | | | 90982371- | 91009401- | | |
| | | | | 91020447 | 91009420 | | |
| 397 | 84146 | ZNF644 | intron_04 | chr1: | chr1: | GUGUACCUUAUGGUUUAUUA | − |
| | | | | 90982371- | 91009409- | | |
| | | | | 91020447 | 91009428 | | |
| 398 | 84146 | ZNF644 | intron_04 | chr1: | chr1: | UGUACCUUAUGGUUUAUUAU | − |
| | | | | 90982371- | 91009408- | | |
| | | | | 91020447 | 91009427 | | |
| 399 | 84146 | ZNF644 | intron_04 | chr1: | chr1: | UAGGAAAUAGAACAGAAGCU | − |
| | | | | 90982371- | 91009298- | | |
| | | | | 91020447 | 91009317 | | |
| 400 | 84146 | ZNF644 | intron_04 | chr1: | chr1: | GUAAAUGUUAUACUAAAACG | + |
| | | | | 90982371- | 91009244- | | |
| | | | | 91020447 | 91009263 | | |
| 401 | 84146 | ZNF644 | intron_04 | chr1: | chr1: | CAGUUAAUAUAGGCUUAACU | − |
| | | | | 90982371- | 91009208- | | |
| | | | | 91020447 | 91009227 | | |
| 402 | 84146 | ZNF644 | intron_04 | chr1: | chr1: | AGUAUGUAGUAGUUCUCUGC | − |
| | | | | 90982371- | 91009163- | | |
| | | | | 91020447 | 91009182 | | |
| 403 | 84146 | ZNF644 | intron_04 | chr1: | chr1: | CCUGUUGGAAAGGAGCGAAG | + |
| | | | | 90982371- | 91009125- | | |
| | | | | 91020447 | 91009144 | | |
| 404 | 84146 | ZNF644 | intron_04 | chr1: | chr1: | ACCUGUUGGAAAGGAGCGAA | + |
| | | | | 90982371- | 91009124- | | |
| | | | | 91020447 | 91009143 | | |
| 405 | 84146 | ZNF644 | intron_04 | chr1: | chr1: | UUGGGCAAUACCUGUUGGAA | + |
| | | | | 90982371- | 91009115- | | |
| | | | | 91020447 | 91009134 | | |
| 406 | 84146 | ZNF644 | intron_04 | chr1: | chr1: | CCCCUUCGCUCCUUUCCAAC | − |
| | | | | 90982371- | 91009128- | | |
| | | | | 91020447 | 91009147 | | |
| 407 | 84146 | ZNF644 | intron_04 | chr1: | chr1: | AGAGCUUGGGCAAUACCUGU | + |
| | | | | 90982371- | 91009110- | | |
| | | | | 91020447 | 91009129 | | |
| 408 | 84146 | ZNF644 | intron_04 | chr1: | chr1: | AGAACGGCUUAUGAGAGCUU | + |
| | | | | 90982371- | 91009097- | | |
| | | | | 91020447 | 91009116 | | |
| 409 | 84146 | ZNF644 | intron_04 | chr1: | chr1: | AAGAACGGCUUAUGAGAGCU | + |
| | | | | 90982371- | 91009096- | | |
| | | | | 91020447 | 91009115 | | |
| 410 | 84146 | ZNF644 | intron_04 | chr1: | chr1: | GAUGAAGUCCUUUCCAGCUU | L |
| | | | | 90982371- | 91008909- | | |
| | | | | 91020447 | 91008928 | | |
| 411 | 84146 | ZNF644 | intron_04 | chr1: | chr1: | UUGACAGCAGGAAUAACAGA | + |
| | | | | 90982371- | 91008875- | | |
| | | | | 91020447 | 91008894 | | |
| 412 | 84146 | ZNF644 | intron_04 | chr1: | chr1: | UCUACUGUGCUUUUCAACCU | − |
| | | | | 90982371- | 91008844- | | |
| | | | | 91020447 | 91008863 | | |
| 413 | 84146 | ZNF644 | intron_04 | chr1: | chr1: | GGUAAUAAUCGCACAGAUGA | + |
| | | | | 90982371- | 91008804- | | |
| | | | | 91020447 | 91008823 | | |
| 414 | 84146 | ZNF644 | intron_04 | chr1: | chr1: | CUUUACUUGCUGCAGUUAAA | + |
| | | | | 90982371- | 91008783- | | |
| | | | | 91020447 | 91008802 | | |
| 415 | 84146 | ZNF644 | intron_04 | chr1: | chr1: | AAGUAAAGACGUUAAUAGUG | − |
| | | | | 90982371- | 91008771- | | |
| | | | | 91020447 | 91008790 | | |
| 416 | 84146 | ZNF644 | intron_04 | chr1: | chr1: | ACGUUAAUAGUGAGGUUUUU | − |
| | | | | 90982371- | 91008763- | | |
| | | | | 91020447 | 91008782 | | |
| 417 | 84146 | ZNF644 | intron_04 | chr1: | chr1: | UAGUGAGGUUUUUGGGAAUG | − |
| | | | | 90982371- | 91008756- | | |
| | | | | 91020447 | 91008775 | | |
| 418 | 84146 | ZNF644 | intron_04 | chr1: | chr1: | GGGAAUGUGGUAAAACCGGG | − |
| | | | | 90982371- | 91008743- | | |
| | | | | 91020447 | 91008762 | | |
| 419 | 84146 | ZNF644 | intron_04 | chr1: | chr1: | UUUGUCCAAGUUAUCUGAUG | − |
| | | | | 90982371- | 91008710- | | |
| | | | | 91020447 | 91008729 | | |
| 420 | 84146 | ZNF644 | intron_04 | chr1: | chr1: | UCAGCUAAAGCAAAAUACAG | − |
| | | | | 90982371- | 91008683- | | |
| | | | | 91020447 | 91008702 | | |
| 421 | 84146 | ZNF644 | intron_04 | chr1: | chr1: | UCUAGGUCCCAGUGAUAGUA | + |
| | | | | 90982371- | 91008651- | | |
| | | | | 91020447 | 91008670 | | |
| 422 | 84146 | ZNF644 | intron_04 | chr1: | chr1: | GGGUUGCUCCCUACUAUCAC | − |
| | | | | 90982371- | 91008662- | | |
| | | | | 91020447 | 91008681 | | |
| 423 | 84146 | ZNF644 | intron_04 | chr1: | chr1: | GGUUGCUCCCUACUAUCACU | − |
| | | | | 90982371- | 91008661- | | |
| | | | | 91020447 | 91008680 | | |
| 424 | 84146 | ZNF644 | intron_04 | chr1: | chr1: | UCAUCUACAUCUCUGAAAAA | − |
| | | | | 90982371- | 91008627- | | |
| | | | | 91020447 | 91008646 | | |
| 425 | 84146 | ZNF644 | intron_04 | chr1: | chr1: | GGGUUUCUGUAUGAUAGUAU | − |
| | | | | 90982371- | 91008605- | | |
| | | | | 91020447 | 91008624 | | |
| 426 | 84146 | ZNF644 | intron_04 | chr1: | chr1: | UCCUAUACCACUAGUUCAUC | + |
| | | | | 90982371- | 91008536- | | |
| | | | | 91020447 | 91008555 | | |
| 427 | 84146 | ZNF644 | intron_04 | chr1: | chr1: | UCCUGAUGAACUAGUGGUAU | − |
| | | | | 90982371- | 91008540- | | |
| | | | | 91020447 | 91008559 | | |
| 428 | 84146 | ZNF644 | intron_04 | chr1: | chr1: | AGAACUCUGGAGCCAUACAC | + |
| | | | | 90982371- | 91008458- | | |
| | | | | 91020447 | 91008477 | | |
| 429 | 84146 | ZNF644 | intron_04 | chr1: | chr1: | GUGUAUGGCUCCAGAGUUCU | − |
| | | | | 90982371- | 91008458- | | |
| | | | | 91020447 | 91008477 | | |
| 430 | 84146 | ZNF644 | intron_04 | chr1: | chr1: | ACCAGUUCUAGACUAAUUCU | + |
| | | | | 90982371- | 91008365- | | |
| | | | | 91020447 | 91008384 | | |
| 431 | 84146 | ZNF644 | intron_04 | chr1: | chr1: | UCUCAAGUACAGAGAUCCUC | + |
| | | | | 90982371- | 91008195- | | |
| | | | | 91020447 | 91008214 | | |
| 432 | 84146 | ZNF644 | intron_04 | chr1: | chr1: | CAGUAUUCUCAGAACUGGGA | + |
| | | | | 90982371- | 91008072- | | |
| | | | | 91020447 | 91008091 | | |
| 433 | 84146 | ZNF644 | intron_04 | chr1: | chr1: | UCAGCCAGUAUUCUCAGAAC | + |
| | | | | 90982371- | 91008067- | | |
| | | | | 91020447 | 91008086 | | |
| 434 | 84146 | ZNF644 | intron_04 | chr1: | chr1: | UACUGUAGGAUUAUCAAUCU | + |
| | | | | 90982371- | 91007947- | | |
| | | | | 91020447 | 91007966 | | |
| 435 | 84146 | ZNF644 | intron_04 | chr1: | chr1: | AUACUGUAGGAUUAUCAAUC | + |
| | | | | 90982371- | 91007946- | | |
| | | | | 91020447 | 91007965 | | |
| 436 | 84146 | ZNF644 | intron_04 | chr1: | chr1: | UAAUCUCAUAUUUAAGAUUG | + |
| | | | | 90982371- | 91007882- | | |
| | | | | 91020447 | 91007901 | | |
| 437 | 84146 | ZNF644 | intron_04 | chr1: | chr1: | UCUAGAAGCUCUUGUUUUCU | + |
| | | | | 90982371- | 91007699- | | |
| | | | | 91020447 | 91007718 | | |
| 438 | 84146 | ZNF644 | intron_04 | chr1: | chr1: | CUCUUUUUGUCCUCCUCCGU | + |
| | | | | 90982371- | 91007589- | | |
| | | | | 91020447 | 91007608 | | |
| 439 | 84146 | ZNF644 | intron_04 | chr1: | chr1: | ACUCUUUUUGUCCUCCUCCG | + |
| | | | | 90982371- | 91007588- | | |
| | | | | 91020447 | 91007607 | | |
| 440 | 84146 | ZNF644 | intron_04 | chr1: | chr1: | AUUCAUGAGCCCUUUCACUG | + |
| | | | | 90982371- | 91007148- | | |
| | | | | 91020447 | 91007167 | | |
| 441 | 84146 | ZNF644 | intron_04 | chr1: | chr1: | CUUGAUCUUCCCUUUAUUUC | + |
| | | | | 90982371- | 91007062- | | |
| | | | | 91020447 | 91007081 | | |
| 442 | 84146 | ZNF644 | intron_04 | chr1: | chr1: | AAGGUAUAGAAUGAAUAGUU | + |
| | | | | 90982371- | 91006935- | | |
| | | | | 91020447 | 91006954 | | |
| 443 | 84146 | ZNF644 | intron_04 | chr1: | chr1: | CCACACUUGAUAGCUUGGUA | + |
| | | | | 90982371- | 91006916- | | |
| | | | | 91020447 | 91006935 | | |
| 444 | 84146 | ZNF644 | intron_04 | chr1: | chr1: | UCCUCCCACACUUGAUAGCU | + |
| | | | | 90982371- | 91006911- | | |
| | | | | 91020447 | 91006930 | | |
| 445 | 84146 | ZNF644 | intron_04 | chr1: | chr1: | UAGUUAACCCAUCACUUUGA | + |
| | | | | 90982371- | 91006807- | | |
| | | | | 91020447 | 91006826 | | |
| 446 | 84146 | ZNF644 | intron_04 | chr1: | chr1: | CUGUAAUGCAUCCUACUUUC | + |
| | | | | 90982371- | 91006770- | | |
| | | | | 91020447 | 91006789 | | |
| 447 | 84146 | ZNF644 | intron_04 | chr1: | chr1: | AGACUGCUUCCCUGGAAUCU | + |
| | | | | 90982371- | 91006436- | | |
| | | | | 91020447 | 91006455 | | |
| 448 | 84146 | ZNF644 | intron_04 | chr1: | chr1: | CAGACUGCUUCCCUGGAAUC | + |
| | | | | 90982371- | 91006435- | | |
| | | | | 91020447 | 91006454 | | |
| 449 | 84146 | ZNF644 | intron_04 | chr1: | chr1: | AGAUUUAGAUCACUACAGUG | + |
| | | | | 90982371- | 91006019- | | |
| | | | | 91020447 | 91006038 | | |
| 450 | 84146 | ZNF644 | intron_04 | chr1: | chr1: | AAGUAAACGCAAUGCUUACA | + |
| | | | | 90982371- | 91005764- | | |
| | | | | 91020447 | 91005783 | | |
| 451 | 84146 | ZNF644 | intron_04 | chr1: | chr1: | GAAGUAAACGCAAUGCUUAC | + |
| | | | | 90982371- | 91005763- | | |
| | | | | 91020447 | 91005782 | | |
| 452 | 84146 | ZNF644 | intron_04 | chr1: | chr1: | CACCUAACAACAGCAGAGUA | + |
| | | | | 90982371- | 91005476- | | |
| | | | | 91020447 | 91005495 | | |
| 453 | 84146 | ZNF644 | intron_04 | chr1: | chr1: | AGGCAGCACUACAGGACUAG | + |
| | | | | 90982371- | 91004894- | | |
| | | | | 91020447 | 91004913 | | |
| 454 | 84146 | ZNF644 | intron_04 | chr1: | chr1: | UAACAGCACGAAGGAAGGAG | + |
| | | | | 90982371- | 91004686- | | |
| | | | | 91020447 | 91004705 | | |
| 455 | 84146 | ZNF644 | intron_04 | chr1: | chr1: | GGUAUAAAAGGAUGUAUGUA | + |
| | | | | 90982371- | 91004660- | | |
| | | | | 91020447 | 91004679 | | |
| 456 | 84146 | ZNF644 | intron_04 | chr1: | chr1: | AAGCUCAAGGAACUACACAG | + |
| | | | | 90982371- | 91004211- | | |
| | | | | 91020447 | 91004230 | | |
| 457 | 84146 | ZNF644 | intron_04 | chr1: | chr1: | AAUAGGAGUUCUACAAAAGA | + |
| | | | | 90982371- | 91004098- | | |
| | | | | 91020447 | 91004117 | | |
| 458 | 84146 | ZNF644 | intron_04 | chr1: | chr1: | CAUCCCAUUGUAUACCUAAU | + |
| | | | | 90982371- | 91004081- | | |
| | | | | 91020447 | 91004100 | | |
| 459 | 84146 | ZNF644 | intron_04 | chr1: | chr1: | CUACGUCAUCUACAUCAUCA | + |
| | | | | 90982371- | 90998544- | | |
| | | | | 91020447 | 90998563 | | |
| 460 | 84146 | ZNF644 | intron_04 | chr1: | chr1: | CAAACAACGCUGGGGCAGAG | + |
| | | | | 90982371- | 90997463- | | |
| | | | | 91020447 | 90997482 | | |
| 461 | 84146 | ZNF644 | intron_04 | chr1: | chr1: | CUAAAAUAACAAACAACGCU | + |
| | | | | 90982371- | 90997454- | | |
| | | | | 91020447 | 90997473 | | |
| 462 | 84146 | ZNF644 | intron_04 | chr1: | chr1: | ACUAAAAUAACAAACAACGC | + |
| | | | | 90982371- | 90997453- | | |
| | | | | 91020447 | 90997472 | | |
| 463 | 84146 | ZNF644 | intron_04 | chr1: | chr1: | CAAAAAGAUUUAUUGCUCCC | + |
| | | | | 90982371- | 90997311- | | |
| | | | | 91020447 | 90997330 | | |
| 464 | 84146 | ZNF644 | intron_04 | chr1: | chr1: | AAGACCUAAGUGCUCACCUC | + |
| | | | | 90982371- | 90997185- | | |
| | | | | 91020447 | 90997204 | | |
| 465 | 84146 | ZNF644 | intron_04 | chr1: | chr1: | AAAGGGCUGUAUACACGCCC | + |
| | | | | 90982371- | 90997161- | | |
| | | | | 91020447 | 90997180 | | |
| 466 | 84146 | ZNF644 | intron_04 | chr1: | chr1: | AGAGAGCCACAUGUACAGAA | + |
| | | | | 90982371- | 90997143- | | |
| | | | | 91020447 | 90997162 | | |
| 467 | 84146 | ZNF644 | intron_04 | chr1: | chr1: | UAAUUGUUUCAUAUUGCAGC | + |
| | | | | 90982371- | 90997022- | | |
| | | | | 91020447 | 90997041 | | |
| 468 | 84146 | ZNF644 | intron_04 | chr1: | chr1: | CAAUACCCUAGGACAACCAA | + |
| | | | | 90982371- | 90996975- | | |
| | | | | 91020447 | 90996994 | | |
| 469 | 84146 | ZNF644 | intron_04 | chr1: | chr1: | AAAGCUUCCCCCAAUACCCU | + |
| | | | | 90982371- | 90996964- | | |
| | | | | 91020447 | 90996983 | | |
| 470 | 84146 | ZNF644 | intron_04 | chr1: | chr1: | ACAUCUGGUGGUCUCCUGGA | + |
| | | | | 90982371- | 90996887- | | |
| | | | | 91020447 | 90996906 | | |
| 471 | 84146 | ZNF644 | intron_04 | chr1: | chr1: | UCAUUAUUUAACACAUCUGG | + |
| | | | | 90982371- | 90996875- | | |
| | | | | 91020447 | 90996894 | | |
| 472 | 84146 | ZNF644 | intron_04 | chr1: | chr1: | AAUUAGCAGCCUGGGGGAUC | + |
| | | | | 90982371- | 90996487- | | |
| | | | | 91020447 | 90996506 | | |
| 473 | 84146 | ZNF644 | intron_04 | chr1: | chr1: | CUCAGUCACAUUUGGAAUCA | + |
| | | | | 90982371- | 90996099- | | |
| | | | | 91020447 | 90996118 | | |
| 474 | 84146 | ZNF644 | intron_04 | chr1: | chr1: | ACUCAGUCACAUUUGGAAUC | + |
| | | | | 90982371- | 90996098- | | |
| | | | | 91020447 | 90996117 | | |
| 475 | 84146 | ZNF644 | intron_04 | chr1: | chr1: | GGUUGACCUAUCAGAAAAAA | + |
| | | | | 90982371- | 90995681- | | |
| | | | | 91020447 | 90995700 | | |
| 476 | 84146 | ZNF644 | intron_04 | chr1: | chr1: | CAUAUAUAUCAUAGUCAAGC | + |
| | | | | 90982371- | 90995581- | | |
| | | | | 91020447 | 90995600 | | |
| 477 | 84146 | ZNF644 | intron_04 | chr1: | chr1: | UAUGUAAGUCCCAAAAAGAA | + |
| | | | | 90982371- | 90995423- | | |
| | | | | 91020447 | 90995442 | | |
| 478 | 84146 | ZNF644 | intron_04 | chr1: | chr1: | GAGACCAGUAGGACACUAUU | + |
| | | | | 90982371- | 90995388- | | |
| | | | | 91020447 | 90995407 | | |
| 479 | 84146 | ZNF644 | intron_04 | chr1: | chr1: | AUACCAUAAUGUGCAGUUUC | + |
| | | | | 90982371- | 90995017- | | |
| | | | | 91020447 | 90995036 | | |
| 480 | 84146 | ZNF644 | intron_04 | chr1: | chr1: | GGGAGACCAAGUUUGCAGUC | + |
| | | | | 90982371- | 90994917- | | |
| | | | | 91020447 | 90994936 | | |
| 481 | 84146 | ZNF644 | intron_04 | chr1: | chr1: | GCCGUGGCUGCAUACAUCAG | + |
| | | | | 90982371- | 90994897- | | |
| | | | | 91020447 | 90994916 | | |
| 482 | 84146 | ZNF644 | intron_04 | chr1: | chr1: | GGCCGUGGCUGCAUACAUCA | + |
| | | | | 90982371- | 90994896- | | |
| | | | | 91020447 | 90994915 | | |
| 483 | 84146 | ZNF644 | intron_04 | chr1: | chr1: | UGGCCGUGGCUGCAUACAUC | + |
| | | | | 90982371- | 90994895- | | |
| | | | | 91020447 | 90994914 | | |
| 484 | 84146 | ZNF644 | intron_04 | chr1: | chr1: | CAACCAACUUACUCAGACAC | + |
| | | | | 90982371- | 90994813- | | |
| | | | | 91020447 | 90994832 | | |
| 485 | 84146 | ZNF644 | intron_04 | chr1: | chr1: | CUACAAUCUCCACAAAUCUC | + |
| | | | | 90982371- | 90994786- | | |
| | | | | 91020447 | 90994805 | | |
| 486 | 84146 | ZNF644 | intron_04 | chr1: | chr1: | CCGAGAAGCAAGAAAACCAC | + |
| | | | | 90982371- | 90994752- | | |
| | | | | 91020447 | 90994771 | | |
| 487 | 84146 | ZNF644 | intron_04 | chr1: | chr1: | CAAGGUUGAAGUACUAGUGA | + |
| | | | | 90982371- | 90994691- | | |
| | | | | 91020447 | 90994710 | | |
| 488 | 84146 | ZNF644 | intron_04 | chr1: | chr1: | CAGGAAGCUGCAGCUCUACA | + |
| | | | | 90982371- | 90994673- | | |
| | | | | 91020447 | 90994692 | | |
| 489 | 84146 | ZNF644 | intron_04 | chr1: | chr1: | AACUAUGCAGUGUAGGCAGC | + |
| | | | | 90982371- | 90994654- | | |
| | | | | 91020447 | 90994673 | | |
| 490 | 84146 | ZNF644 | intron_04 | chr1: | chr1: | AGGGGUGAAACAAAAAUUCU | + |
| | | | | 90982371- | 90994468- | | |
| | | | | 91020447 | 90994487 | | |
| 491 | 84146 | ZNF644 | intron_04 | chr1: | chr1: | CACUGUAGGGCUCUGUAUUC | + |
| | | | | 90982371- | 90994390- | | |
| | | | | 91020447 | 90994409 | | |
| 492 | 84146 | ZNF644 | intron_04 | chr1: | chr1: | GUUCAGGGAUGAAAUUACUA | + |
| | | | | 90982371- | 90994219- | | |
| | | | | 91020447 | 90994238 | | |
| 493 | 84146 | ZNF644 | intron_04 | chr1: | chr1: | UCAUGGAGAGAACAUGUUCA | + |
| | | | | 90982371- | 90994204- | | |
| | | | | 91020447 | 90994223 | | |
| 494 | 84146 | ZNF644 | intron_04 | chr1: | chr1: | GCUAUCUUUGCCACACUUCA | + |
| | | | | 90982371- | 90994187- | | |
| | | | | 91020447 | 90994206 | | |
| 495 | 84146 | ZNF644 | intron_04 | chr1: | chr1: | AUGUAGGUUAGAGCAGCCAG | + |
| | | | | 90982371- | 90994165- | | |
| | | | | 91020447 | 90994184 | | |
| 496 | 84146 | ZNF644 | intron_04 | chr1: | chr1: | AACAGUUAUGAGAACGAUGU | + |
| | | | | 90982371- | 90994149- | | |
| | | | | 91020447 | 90994168 | | |
| 497 | 84146 | ZNF644 | intron_04 | chr1: | chr1: | AGUGUCACUUGAAUCCUCAG | + |
| | | | | 90982371- | 90994125- | | |
| | | | | 91020447 | 90994144 | | |
| 498 | 84146 | ZNF644 | intron_04 | chr1: | chr1: | GUUCAUGGAUGGGACUAAAU | + |
| | | | | 90982371- | 90994058- | | |
| | | | | 91020447 | 90994077 | | |
| 499 | 84146 | ZNF644 | intron_04 | chr1: | chr1: | UGUUCAUGGAUGGGACUAAA | + |
| | | | | 90982371- | 90994057- | | |
| | | | | 91020447 | 90994076 | | |
| 500 | 84146 | ZNF644 | intron_04 | chr1: | chr1: | AUCCUAGGCACCUGAAUGGA | + |
| | | | | 90982371- | 90993978- | | |
| | | | | 91020447 | 90993997 | | |
| 501 | 84146 | ZNF644 | intron_04 | chr1: | chr1: | CCCAAUCCUAGGCACCUGAA | + |
| | | | | 90982371- | 90993974- | | |
| | | | | 91020447 | 90993993 | | |
| 502 | 84146 | ZNF644 | intron_04 | chr1: | chr1: | AGUAACCUUAAUUUCCAGAU | + |
| | | | | 90982371- | 90993921- | | |
| | | | | 91020447 | 90993940 | | |
| 503 | 84146 | ZNF644 | intron_04 | chr1: | chr1: | GUUACUAUUAGUAAAAAUAG | − |
| | | | | 90982371- | 90993907- | | |
| | | | | 91020447 | 90993926 | | |
| 504 | 84146 | ZNF644 | intron_04 | chr1: | chr1: | UUACUGGAUCCAGCAAUACA | + |
| | | | | 90982371- | 90993815- | | |
| | | | | 91020447 | 90993834 | | |
| 505 | 84146 | ZNF644 | intron_04 | chr1: | chr1: | UUGUUCCUAGACAACUUUAC | + |
| | | | | 90982371- | 90993799- | | |
| | | | | 91020447 | 90993818 | | |
| 506 | 84146 | ZNF644 | intron_04 | chr1: | chr1: | UGGAUCCAGUAAAGUUGUCU | − |
| | | | | 90982371- | 90993807- | | |
| | | | | 91020447 | 90993826 | | |
| 507 | 84146 | ZNF644 | intron_04 | chr1: | chr1: | CUCUUAACUUUUGAAGACAA | + |
| | | | | 90982371- | 90993624- | | |
| | | | | 91020447 | 90993643 | | |
| 508 | 84146 | ZNF644 | intron_04 | chr1: | chr1: | UCAAUAUAAAAUAACUCCUA | − |
| | | | | 90982371- | 90993590- | | |
| | | | | 91020447 | 90993609 | | |
| 509 | 84146 | ZNF644 | intron_04 | chr1: | chr1: | UCAAGACCAGAAACGCCACC | + |
| | | | | 90982371- | 90993430- | | |
| | | | | 91020447 | 90993449 | | |
| 510 | 84146 | ZNF644 | intron_04 | chr1: | chr1: | AACUACAGCCAGCUCAAUAU | + |
| | | | | 90982371- | 90993290- | | |
| | | | | 91020447 | 90993309 | | |
| 511 | 84146 | ZNF644 | intron_04 | chr1: | chr1: | ACUCUCAUCUGCUUCAGAAU | + |
| | | | | 90982371- | 90993232- | | |
| | | | | 91020447 | 90993251 | | |
| 512 | 84146 | ZNF644 | intron_04 | chr1: | chr1: | AACUCUCAUCUGCUUCAGAA | + |
| | | | | 90982371- | 90993231- | | |
| | | | | 91020447 | 90993250 | | |
| 513 | 84146 | ZNF644 | intron_04 | chr1: | chr1: | GACCUUAUAAGAAACACCAG | + |
| | | | | 90982371- | 90993104- | | |
| | | | | 91020447 | 90993123 | | |
| 514 | 84146 | ZNF644 | intron_04 | chr1: | chr1: | UCAUCAAGAGGUGGUCCGCC | + |
| | | | | 90982371- | 90992749- | | |
| | | | | 91020447 | 90992768 | | |
| 515 | 84146 | ZNF644 | intron_04 | chr1: | chr1: | CGUUAUCCAUGUAUUUGGCA | + |
| | | | | 90982371- | 90992709- | | |
| | | | | 91020447 | 90992728 | | |
| 516 | 84146 | ZNF644 | intron_04 | chr1: | chr1: | CACCUCGUUAUCCAUGUAUU | + |
| | | | | 90982371- | 90992704- | | |
| | | | | 91020447 | 90992723 | | |
| 517 | 84146 | ZNF644 | intron_04 | chr1: | chr1: | AUUGUUUGCAUAUAGAAAUU | − |
| | | | | 90982371- | 90992587- | | |
| | | | | 91020447 | 90992606 | | |
| 518 | 84146 | ZNF644 | intron_04 | chr1: | chr1: | CAAAGAGUAAUCUGGACUAC | + |
| | | | | 90982371- | 90992532- | | |
| | | | | 91020447 | 90992551 | | |
| 519 | 84146 | ZNF644 | intron_04 | chr1: | chr1: | AAAUAUAGCAAAGAGUAAUC | + |
| | | | | 90982371- | 90992524- | | |
| | | | | 91020447 | 90992543 | | |
| 520 | 84146 | ZNF644 | intron_04 | chr1: | chr1: | CUAUAUUUGUUUCAUACAUC | − |
| | | | | 90982371- | 90992512- | | |
| | | | | 91020447 | 90992531 | | |
| 521 | 84146 | ZNF644 | intron_04 | chr1: | chr1: | UACCAACAUCUACCUACAAC | + |
| | | | | 90982371- | 90992446- | | |
| | | | | 91020447 | 90992465 | | |
| 522 | 84146 | ZNF644 | intron_04 | chr1: | chr1: | UACCAGUUGUAGGUAGAUGU | − |
| | | | | 90982371- | 90992451- | | |
| | | | | 91020447 | 90992470 | | |
| 523 | 84146 | ZNF644 | intron_04 | chr1: | chr1: | ACACCUGCAACAGAAUAUGU | + |
| | | | | 90982371- | 90991951- | | |
| | | | | 91020447 | 90991970 | | |
| 524 | 84146 | ZNF644 | intron_04 | chr1: | chr1: | GCGGAAAAAUGUCCACCAAC | + |
| | | | | 90982371- | 90991912- | | |
| | | | | 91020447 | 90991931 | | |
| 525 | 84146 | ZNF644 | intron_04 | chr1: | chr1: | GUCAAACAUACACCUACUAC | + |
| | | | | 90982371- | 90991381- | | |
| | | | | 91020447 | 90991400 | | |
| 526 | 84146 | ZNF644 | intron_04 | chr1: | chr1: | UGGCACCAGGAGAACUUUUG | + |
| | | | | 90982371- | 90990930- | | |
| | | | | 91020447 | 90990949 | | |
| 527 | 84146 | ZNF644 | intron_04 | chr1: | chr1: | CAGACCCCCAAAAAGGAACG | + |
| | | | | 90982371- | 90990889- | | |
| | | | | 91020447 | 90990908 | | |
| 528 | 84146 | ZNF644 | intron_04 | chr1: | chr1: | AAAGAGACAGACCCCCAAAA | + |
| | | | | 90982371- | 90990882- | | |
| | | | | 91020447 | 90990901 | | |
| 529 | 84146 | ZNF644 | intron_04 | chr1: | chr1: | AAAAGGAGUCUUGCCUCAGU | + |
| | | | | 90982371- | 90990828- | | |
| | | | | 91020447 | 90990847 | | |
| 530 | 84146 | ZNF644 | intron_04 | chr1: | chr1: | CACGUUAACACCAGACAAAA | + |
| | | | | 90982371- | 90990811- | | |
| | | | | 91020447 | 90990830 | | |
| 531 | 84146 | ZNF644 | intron_04 | chr1: | chr1: | AGUACCUGUUCUCUUAAGAG | + |
| | | | | 90982371- | 90990774- | | |
| | | | | 91020447 | 90990793 | | |
| 532 | 84146 | ZNF644 | intron_04 | chr1: | chr1: | GCAAGGAAGAGUCACCCAAA | + |
| | | | | 90982371- | 90990711- | | |
| | | | | 91020447 | 90990730 | | |
| 533 | 84146 | ZNF644 | intron_04 | chr1: | chr1: | AAAGCCUAAAGAAGUCAUGA | + |
| | | | | 90982371- | 90990596- | | |
| | | | | 91020447 | 90990615 | | |
| 534 | 84146 | ZNF644 | intron_04 | chr1: | chr1: | AAAAGCCUAAAGAAGUCAUG | + |
| | | | | 90982371- | 90990595- | | |
| | | | | 91020447 | 90990614 | | |
| 535 | 84146 | ZNF644 | intron_04 | chr1: | chr1: | AAAGUACAGAUCCCUGCCCA | + |
| | | | | 90982371- | 90990517- | | |
| | | | | 91020447 | 90990536 | | |
| 536 | 84146 | ZNF644 | intron_04 | chr1: | chr1: | AGGUGAGCAAACUUACUGCC | + |
| | | | | 90982371- | 90990492- | | |
| | | | | 91020447 | 90990511 | | |
| 537 | 84146 | ZNF644 | intron_04 | chr1: | chr1: | UGAACCCUGAAAGGGAAACA | + |
| | | | | 90982371- | 90990472- | | |
| | | | | 91020447 | 90990491 | | |
| 538 | 84146 | ZNF644 | intron_04 | chr1: | chr1: | CCUGAUGGUGAACCCUGAAA | + |
| | | | | 90982371- | 90990464- | | |
| | | | | 91020447 | 90990483 | | |
| 539 | 84146 | ZNF644 | intron_04 | chr1: | chr1: | CCCUGAUGGUGAACCCUGAA | + |
| | | | | 90982371- | 90990463- | | |
| | | | | 91020447 | 90990482 | | |
| 540 | 84146 | ZNF644 | intron_04 | chr1: | chr1: | AGUACAUAUAAGAGCCAAGG | + |
| | | | | 90982371- | 90990346- | | |
| | | | | 91020447 | 90990365 | | |
| 541 | 84146 | ZNF644 | intron_04 | chr1: | chr1: | GAAAGUACAUAUAAGAGCCA | + |
| | | | | 90982371- | 90990343- | | |
| | | | | 91020447 | 90990362 | | |
| 542 | 84146 | ZNF644 | intron_04 | chr1: | chr1: | GGAGUGGUUGUCAAAAUCUG | + |
| | | | | 90982371- | 90990132- | | |
| | | | | 91020447 | 90990151 | | |
| 543 | 84146 | ZNF644 | intron_04 | chr1: | chr1: | GAACCCUUGGUGCACUGUUG | + |
| | | | | 90982371- | 90989697- | | |
| | | | | 91020447 | 90989716 | | |
| 544 | 84146 | ZNF644 | intron_04 | chr1: | chr1: | AGGGGAAGGCUUCGGGACAC | + |
| | | | | 90982371- | 90988945- | | |
| | | | | 91020447 | 90988964 | | |
| 545 | 84146 | ZNF644 | intron_04 | chr1: | chr1: | GGGGCCAAUACUAUACAGAG | + |
| | | | | 90982371- | 90988764- | | |
| | | | | 91020447 | 90988783 | | |
| 546 | 84146 | ZNF644 | intron_04 | chr1: | chr1: | AACACACUGUACCCACAGAU | + |
| | | | | 90982371- | 90988410- | | |
| | | | | 91020447 | 90988429 | | |
| 547 | 84146 | ZNF644 | intron_04 | chr1: | chr1: | ACUUACUCUUACCCAACCAA | + |
| | | | | 90982371- | 90986909- | | |
| | | | | 91020447 | 90986928 | | |
| 548 | 84146 | ZNF644 | intron_04 | chr1: | chr1: | UUAAAAGCAGUUGGCACCGC | + |
| | | | | 90982371- | 90986118- | | |
| | | | | 91020447 | 90986137 | | |
| 549 | 84146 | ZNF644 | intron_04 | chr1: | chr1: | UUACUUAUAUAAGUGGGAGG | + |
| | | | | 90982371- | 90986074- | | |
| | | | | 91020447 | 90986093 | | |
| 550 | 84146 | ZNF644 | intron_04 | chr1: | chr1: | AUUACUUAUAUAAGUGGGAG | + |
| | | | | 90982371- | 90986073- | | |
| | | | | 91020447 | 90986092 | | |
| 551 | 84146 | ZNF644 | intron_04 | chr1: | chr1: | UAUUACUUAUAUAAGUGGGA | + |
| | | | | 90982371- | 90986072- | | |
| | | | | 91020447 | 90986091 | | |
| 552 | 84146 | ZNF644 | intron_04 | chr1: | chr1: | AUAUUACUUAUAUAAGUGGG | + |
| | | | | 90982371- | 90986071- | | |
| | | | | 91020447 | 90986090 | | |
| 553 | 84146 | ZNF644 | intron_04 | chr1: | chr1: | GGAAUAUUACUUAUAUAAGU | + |
| | | | | 90982371- | 90986068- | | |
| | | | | 91020447 | 90986087 | | |
| 554 | 84146 | ZNF644 | intron_04 | chr1: | chr1: | UGGAAUAUUACUUAUAUAAG | + |
| | | | | 90982371- | 90986067- | | |
| | | | | 91020447 | 90986086 | | |
| 555 | 84146 | ZNF644 | intron_04 | chr1: | chr1: | CAUUCCUAACAAGGUACACA | + |
| | | | | 90982371- | 90985907- | | |
| | | | | 91020447 | 90985926 | | |
| 556 | 84146 | ZNF644 | intron_04 | chr1: | chr1: | UGGAGAGUACGAGCAAAGCA | − |
| | | | | 90982371- | 90985070- | | |
| | | | | 91020447 | 90985089 | | |
| 557 | 84146 | ZNF644 | intron_04 | chr1: | chr1: | CUGCAAAAGAGAGAUGCCUC | + |
| | | | | 90982371- | 90984747- | | |
| | | | | 91020447 | 90984766 | | |
| 558 | 84146 | ZNF644 | intron_04 | chr1: | chr1: | UACAAGGUAUGCACACACAG | + |
| | | | | 90982371- | 90984715- | | |
| | | | | 91020447 | 90984734 | | |
| 559 | 84146 | ZNF644 | intron_04 | chr1: | chr1: | UUCAGGAAUCAAGUUAAAUA | + |
| | | | | 90982371- | 90984377- | | |
| | | | | 91020447 | 90984396 | | |
| 560 | 84146 | ZNF644 | intron_04 | chr1: | chr1: | UAUUAGAGCGAGAGCCUUUC | + |
| | | | | 90982371- | 90984360- | | |
| | | | | 91020447 | 90984379 | | |
| 561 | 84146 | ZNF644 | intron_04 | chr1: | chr1: | ACGAACUGCAUUGGUCUGCU | + |
| | | | | 90982371- | 90984289- | | |
| | | | | 91020447 | 90984308 | | |
| 562 | 84146 | ZNF644 | intron_04 | chr1: | chr1: | AAAGAUGUUACGAACUGCAU | + |
| | | | | 90982371- | 90984280- | | |
| | | | | 91020447 | 90984299 | | |
| 563 | 84146 | ZNF644 | intron_04 | chr1: | chr1: | GUUCGUAACAUCUUUUAUAU | − |
| | | | | 90982371- | 90984275- | | |
| | | | | 91020447 | 90984294 | | |
| 564 | 84146 | ZNF644 | intron_04 | chr1: | chr1: | UUCGUAACAUCUUUUAUAUA | − |
| | | | | 90982371- | 90984274- | | |
| | | | | 91020447 | 90984293 | | |
| 565 | 84146 | ZNF644 | intron_04 | chr1: | chr1: | UCGUAACAUCUUUUAUAUAG | − |
| | | | | 90982371- | 90984273- | | |
| | | | | 91020447 | 90984292 | | |
| 566 | 84146 | ZNF644 | intron_04 | chr1: | chr1: | CUGAAGACAGCAAGUUCUCA | + |
| | | | | 90982371- | 90984231- | | |
| | | | | 91020447 | 90984250 | | |
| 567 | 84146 | ZNF644 | intron_04 | chr1: | chr1: | GAAGGACAUGGGCCAUAGCC | + |
| | | | | 90982371- | 90983991- | | |
| | | | | 91020447 | 90984010 | | |
| 568 | 84146 | ZNF644 | intron_04 | chr1: | chr1: | UUUCGUAGACUGGAAGGACA | + |
| | | | | 90982371- | 90983979- | | |
| | | | | 91020447 | 90983998 | | |
| 569 | 84146 | ZNF644 | intron_04 | chr1: | chr1: | UGCUGCUUUCGUAGACUGGA | + |
| | | | | 90982371- | 90983973- | | |
| | | | | 91020447 | 90983992 | | |
| 570 | 84146 | ZNF644 | intron_04 | chr1: | chr1: | AAAAUGCUGCUUUCGUAGAC | + |
| | | | | 90982371- | 90983969- | | |
| | | | | 91020447 | 90983988 | | |
| 571 | 84146 | ZNF644 | intron_04 | chr1: | chr1: | AGAAGACAAGCGGAGAGGCC | + |
| | | | | 90982371- | 90983629- | | |
| | | | | 91020447 | 90983648 | | |
| 572 | 84146 | ZNF644 | intron_04 | chr1: | chr1: | GAGAAGACAAGCGGAGAGGC | + |
| | | | | 90982371- | 90983628- | | |
| | | | | 91020447 | 90983647 | | |
| 573 | 84146 | ZNF644 | intron_04 | chr1: | chr1: | GUCUAUUAUAAACGACUGAG | + |
| | | | | 90982371- | 90983383- | | |
| | | | | 91020447 | 90983402 | | |
| 574 | 84146 | ZNF644 | intron_04 | chr1: | chr1: | CAACCCAGAAGUGGACAUGG | + |
| | | | | 90982371- | 90983316- | | |
| | | | | 91020447 | 90983335 | | |
| 575 | 84146 | ZNF644 | intron_04 | chr1: | chr1: | GAUACGAUGCAGAAAAUUCU | − |
| | | | | 90982371- | 90983247- | | |
| | | | | 91020447 | 90983266 | | |
| 576 | 84146 | ZNF644 | intron_04 | chr1: | chr1: | CUAGGUCUGUGGUUCUAGGA | − |
| | | | | 90982371- | 90983229- | | |
| | | | | 91020447 | 90983248 | | |
| 577 | 84146 | ZNF644 | intron_04 | chr1: | chr1: | CCUACCUCUGUUCUCAAGCU | + |
| | | | | 90982371- | 90983160- | | |
| | | | | 91020447 | 90983179 | | |
| 578 | 84146 | ZNF644 | intron_04 | chr1: | chr1: | GUAACCUAGCUUGAGAACAG | − |
| | | | | 90982371- | 90983167- | | |
| | | | | 91020447 | 90983186 | | |
| 579 | 84146 | ZNF644 | intron_04 | chr1: | chr1: | CCUAGCUUGAGAACAGAGGU | − |
| | | | | 90982371- | 90983163- | | |
| | | | | 91020447 | 90983182 | | |
| 580 | 84146 | ZNF644 | intron_04 | chr1: | chr1: | UCACAAGCUAGUUUCAGGUA | − |
| | | | | 90982371- | 90983098- | | |
| | | | | 91020447 | 90983117 | | |
| 581 | 84146 | ZNF644 | intron_04 | chr1: | chr1: | CACAAGCUAGUUUCAGGUAU | − |
| | | | | 90982371- | 90983097- | | |
| | | | | 91020447 | 90983116 | | |
| 582 | 84146 | ZNF644 | intron_04 | chr1: | chr1: | ACAAGCUAGUUUCAGGUAUG | − |
| | | | | 90982371- | 90983096- | | |
| | | | | 91020447 | 90983115 | | |
| 583 | 84146 | ZNF644 | intron_04 | chr1: | chr1: | UAUGGUAAAAUUAGUAAUGG | − |
| | | | | 90982371- | 90983021- | | |
| | | | | 91020447 | 90983040 | | |
| 584 | 84146 | ZNF644 | intron_04 | chr1: | chr1: | UUCUCUAGAAUAAUGAUGCU | |
| | | | | 90982371- | 90982896- | | |
| | | | | 91020447 | 90982915 | | |
| 585 | 84146 | ZNF644 | intron_04 | chr1: | chr1: | AUUUAGUAAGUAAUCAGUGU | − |
| | | | | 90982371- | 90982872- | | |
| | | | | 91020447 | 90982891 | | |
| 586 | 84146 | ZNF644 | intron_04 | chr1: | chr1: | UCAAAAAAAGCAGUGAGGUU | − |
| | | | | 90982371- | 90982561- | | |
| | | | | 91020447 | 90982580 | | |
| 587 | 84146 | ZNF644 | intron_04 | chr1: | chr1: | AUAAUAGUGUAUUGUAGCUA | − |
| | | | | 90982371- | 90982430- | | |
| | | | | 91020447 | 90982449 | | |
| 588 | 84146 | ZNF644 | exon_05_c.2/ | chr1: | chr1: | AUGUUAAUAAGACAAAAUCU | − |
| | | | nc.3 | 90982310- | 90982312- | | |
| | | | | 90982331 | 90982331 | | |
| 589 | 84146 | ZNF644 | intron_05 | chr1: | chr1: | AAUUGACUUUUUGACACACU | − |
| | | | | 90973214- | 90982163- | | |
| | | | | 90982309 | 90982182 | | |
| 590 | 84146 | ZNF644 | intron_05 | chr1: | chr1: | ACUUGGUCCAGUUGAUUUGA | − |
| | | | | 90973214- | 90982146- | | |
| | | | | 90982309 | 90982165 | | |
| 591 | 84146 | ZNF644 | intron_05 | chr1: | chr1: | CUUGGUCCAGUUGAUUUGAU | − |
| | | | | 90973214- | 90982145- | | |
| | | | | 90982309 | 90982164 | | |
| 592 | 84146 | ZNF644 | intron_05 | chr1: | chr1: | GUUAACCUCAACACAAAAGA | + |
| | | | | 90973214- | 90982075- | | |
| | | | | 90982309 | 90982094 | | |
| 593 | 84146 | ZNF644 | intron_05 | chr1: | chr1: | UGGUCAGAGUUCAAUAAGAG | + |
| | | | | 90973214- | 90981987- | | |
| | | | | 90982309 | 90982006 | | |
| 594 | 84146 | ZNF644 | intron_05 | chr1: | chr1: | UUCAUAUACUUUAUCAACAA | + |
| | | | | 90973214- | 90981925- | | |
| | | | | 90982309 | 90981944 | | |
| 595 | 84146 | ZNF644 | intron_05 | chr1: | chr1: | AUUCAGUAGAGACACCCACU | + |
| | | | | 90973214- | 90981766- | | |
| | | | | 90982309 | 90981785 | | |
| 596 | 84146 | ZNF644 | intron_05 | chr1: | chr1: | UGAAUUGGCAUCAUGUACUU | − |
| | | | | 90973214- | 90981689- | | |
| | | | | 90982309 | 90981708 | | |
| 597 | 84146 | ZNF644 | intron_05 | chr1: | chr1: | AGCUGAAACAUCUGGUUAGA | + |
| | | | | 90973214- | 90981520- | | |
| | | | | 90982309 | 90981539 | | |
| 598 | 84146 | ZNF644 | intron_05 | chr1: | chr1: | GAAAUCUCAGUCAGUGGUUU | − |
| | | | | 90973214- | 90981414- | | |
| | | | | 90982309 | 90981433 | | |
| 599 | 84146 | ZNF644 | intron_05 | chr1: | chr1: | AGGUACUAUAACGAUCAAUA | + |
| | | | | 90973214- | 90981280- | | |
| | | | | 90982309 | 90981299 | | |
| 600 | 84146 | ZNF644 | intron_05 | chr1: | chr1: | AAAUUUUUCUACACAACAAG | + |
| | | | | 90973214- | 90981257- | | |
| | | | | 90982309 | 90981276 | | |
| 601 | 84146 | ZNF644 | intron_05 | chr1: | chr1: | UCCACUUUAAGAAGAUACAU | + |
| | | | | 90973214- | 90981155- | | |
| | | | | 90982309 | 90981174 | | |
| 602 | 84146 | ZNF644 | intron_05 | chr1: | chr1: | UGUACUUGAAGGUCUUAUUA | − |
| | | | | 90973214- | 90981119- | | |
| | | | | 90982309 | 90981138 | | |
| 603 | 84146 | ZNF644 | intron_05 | chr1: | chr1: | UAUUGCUUGUGGGAUGACAC | − |
| | | | | 90973214- | 90981034- | | |
| | | | | 90982309 | 90981053 | | |
| 604 | 84146 | ZNF644 | intron_05 | chr1: | chr1: | AGGCUAUUAGACUGGAAGCG | + |
| | | | | 90973214- | 90980805- | | |
| | | | | 90982309 | 90980824 | | |
| 605 | 84146 | ZNF644 | intron_05 | chr1: | chr1: | AAAGGCUAUUAGACUGGAAG | + |
| | | | | 90973214- | 90980803- | | |
| | | | | 90982309 | 90980822 | | |
| 606 | 84146 | ZNF644 | intron_05 | chr1: | chr1: | AGGGGAAAAGGCUAUUAGAC | + |
| | | | | 90973214- | 90980797- | | |
| | | | | 90982309 | 90980816 | | |
| 607 | 84146 | ZNF644 | intron_05 | chr1: | chr1: | CAGAAAGAUGAUUACUUCAG | + |
| | | | | 90973214- | 90980779- | | |
| | | | | 90982309 | 90980798 | | |
| 608 | 84146 | ZNF644 | intron_05 | chr1: | chr1: | UAACUGCAUGCCGUGUUAUA | + |
| | | | | 90973214- | 90980428- | | |
| | | | | 90982309 | 90980447 | | |
| 609 | 84146 | ZNF644 | intron_05 | chr1: | chr1: | UCAUAUAAUCCUCAGCAUUC | + |
| | | | | 90973214- | 90980389- | | |
| | | | | 90982309 | 90980408 | | |
| 610 | 84146 | ZNF644 | intron_05 | chr1: | chr1: | GUAGCUAUGCCAGAAUGCUG | − |
| | | | | 90973214- | 90980401- | | |
| | | | | 90982309 | 90980420 | | |
| 611 | 84146 | ZNF644 | intron_05 | chr1: | chr1: | GAGGUCUCUGGCAACUGGGG | + |
| | | | | 90973214- | 90980292- | | |
| | | | | 90982309 | 90980311 | | |
| 612 | 84146 | ZNF644 | intron_05 | chr1: | chr1: | AAAGAGGUCUCUGGCAACUG | + |
| | | | | 90973214- | 90980289- | | |
| | | | | 90982309 | 90980308 | | |
| 613 | 84146 | ZNF644 | intron_05 | chr1: | chr1: | GCAAAGAGGUCUCUGGCAAC | + |
| | | | | 90973214- | 90980287- | | |
| | | | | 90982309 | 90980306 | | |
| 614 | 84146 | ZNF644 | intron_05 | chr1: | chr1: | GAUCAGAUGAUGCUUCAGAU | + |
| | | | | 90973214- | 90980237- | | |
| | | | | 90982309 | 90980256 | | |
| 615 | 84146 | ZNF644 | intron_05 | chr1: | chr1: | UACGGCCAGGCAUGGCUUAA | + |
| | | | | 90973214- | 90980215- | | |
| | | | | 90982309 | 90980234 | | |
| 616 | 84146 | ZNF644 | intron_05 | chr1: | chr1: | CUGAUCCUUUAAGCCAUGCC | − |
| | | | | 90973214- | 90980223- | | |
| | | | | 90982309 | 90980242 | | |
| 617 | 84146 | ZNF644 | intron_05 | chr1: | chr1: | UAAGAUAAACGAGACAUGGA | + |
| | | | | 90973214- | 90980152- | | |
| | | | | 90982309 | 90980171 | | |
| 618 | 84146 | ZNF644 | intron_05 | chr1: | chr1: | CCUGGGAGAACUCUUUUCAU | + |
| | | | | 90973214- | 90980076- | | |
| | | | | 90982309 | 90980095 | | |
| 619 | 84146 | ZNF644 | intron_05 | chr1: | chr1: | CCAAUGAAAAGAGUUCUCCC | − |
| | | | | 90973214- | 90980079- | | |
| | | | | 90982309 | 90980098 | | |
| 620 | 84146 | ZNF644 | intron_05 | chr1: | chr1: | UUGAGUUGCUGUUGGGCCAU | − |
| | | | | 90973214- | 90980007- | | |
| | | | | 90982309 | 90980026 | | |
| 621 | 84146 | ZNF644 | intron_05 | chr1: | chr1: | GUUGCUGUUGGGCCAUAGGA | − |
| | | | | 90973214- | 90980003- | | |
| | | | | 90982309 | 90980022 | | |
| 622 | 84146 | ZNF644 | intron_05 | chr1: | chr1: | AAUGUCUAUAAUGCUGUCUG | + |
| | | | | 90973214- | 90979961- | | |
| | | | | 90982309 | 90979980 | | |
| 623 | 84146 | ZNF644 | intron_05 | chr1: | chr1: | ACUAGCCACUGUAUUUCAAC | + |
| | | | | 90973214- | 90979897- | | |
| | | | | 90982309 | 90979916 | | |
| 624 | 84146 | ZNF644 | intron_05 | chr1: | chr1: | UCAAUCCAGUUGAAAUACAG | − |
| | | | | 90973214- | 90979905- | | |
| | | | | 90982309 | 90979924 | | |
| 625 | 84146 | ZNF644 | intron_05 | chr1: | chr1: | AACAAUGACAGUCUUACUUU | + |
| | | | | 90973214- | 90979855- | | |
| | | | | 90982309 | 90979874 | | |
| 626 | 84146 | ZNF644 | intron_05 | chr1: | chr1: | UGAUUAGUAUUUCCAAGUGG | − |
| | | | | 90973214- | 90979830- | | |
| | | | | 90982309 | 90979849 | | |
| 627 | 84146 | ZNF644 | intron_05 | chr1: | chr1: | CAUGGAUUAAUACCUCCACU | + |
| | | | | 90973214- | 90979815- | | |
| | | | | 90982309 | 90979834 | | |
| 628 | 84146 | ZNF644 | intron_05 | chr1: | chr1: | CACUUCAAAUUUCUGCAACA | + |
| | | | | 90973214- | 90979797- | | |
| | | | | 90982309 | 90979816 | | |
| 629 | 84146 | ZNF644 | intron_05 | chr1: | chr1: | GACUAAUACAAGUAGAAGAU | − |
| | | | | 90973214- | 90979710- | | |
| | | | | 90982309 | 90979729 | | |
| 630 | 84146 | ZNF644 | intron_05 | chr1: | chr1: | GAAAUUGUAGAAUCAUAGCC | − |
| | | | | 90973214- | 90979607- | | |
| | | | | 90982309 | 90979626 | | |
| 631 | 84146 | ZNF644 | intron_05 | chr1: | chr1: | UAGCAAGCUUCCUAAGCUGU | + |
| | | | | 90973214- | 90979559- | | |
| | | | | 90982309 | 90979578 | | |
| 632 | 84146 | ZNF644 | intron_05 | chr1: | chr1: | GUGUUUGAAAUUUGGCUAGU | − |
| | | | | 90973214- | 90979093- | | |
| | | | | 90982309 | 90979112 | | |
| 633 | 84146 | ZNF644 | intron_05 | chr1: | chr1: | UGUUUGAAAUUUGGCUAGUU | − |
| | | | | 90973214- | 90979092- | | |
| | | | | 90982309 | 90979111 | | |
| 634 | 84146 | ZNF644 | intron_05 | chr1: | chr1: | UGAAAUUUGGCUAGUUGGGU | − |
| | | | | 90973214- | 90979088- | | |
| | | | | 90982309 | 90979107 | | |
| 635 | 84146 | ZNF644 | intron_05 | chr1: | chr1: | GGUUGGCUAUAGUAAUCAUC | − |
| | | | | 90973214- | 90979071- | | |
| | | | | 90982309 | 90979090 | | |
| 636 | 84146 | ZNF644 | intron_05 | chr1: | chr1: | GGAAGAACCUCUUCUUGCUU | + |
| | | | | 90973214- | 90979006- | | |
| | | | | 90982309 | 90979025 | | |
| 637 | 84146 | ZNF644 | intron_05 | chr1: | chr1: | GCAACAAAUUGAUCCCUGUG | + |
| | | | | 90973214- | 90978985- | | |
| | | | | 90982309 | 90979004 | | |
| 638 | 84146 | ZNF644 | intron_05 | chr1: | chr1: | UAUGUCUAAGAAAACCCUUG | + |
| | | | | 90973214- | 90978880- | | |
| | | | | 90982309 | 90978899 | | |
| 639 | 84146 | ZNF644 | intron_05 | chr1: | chr1: | AAAGAACCAAGGUCUAUAUA | + |
| | | | | 90973214- | 90978849- | | |
| | | | | 90982309 | 90978868 | | |
| 640 | 84146 | ZNF644 | intron_05 | chr1: | chr1: | CAUGUUGUUGGUUAGAGUUG | − |
| | | | | 90973214- | 90978790- | | |
| | | | | 90982309 | 90978809 | | |
| 641 | 84146 | ZNF644 | intron_05 | chr1: | chr1: | AUCUCAAGGUUAAAUUUCUC | + |
| | | | | 90973214- | 90978762- | | |
| | | | | 90982309 | 90978781 | | |
| 642 | 84146 | ZNF644 | intron_05 | chr1: | chr1: | AUGUAAGUUAGGCAAUCUCA | + |
| | | | | 90973214- | 90978748- | | |
| | | | | 90982309 | 90978767 | | |
| 643 | 84146 | ZNF644 | intron_05 | chr1: | chr1: | AUUUCAAAUCCUUGGAUUCG | + |
| | | | | 90973214- | 90978597- | | |
| | | | | 90982309 | 90978616 | | |
| 644 | 84146 | ZNF644 | intron_05 | chr1: | chr1: | AAUUUCAAAUCCUUGGAUUC | + |
| | | | | 90973214- | 90978596- | | |
| | | | | 90982309 | 90978615 | | |
| 645 | 84146 | ZNF644 | intron_05 | chr1: | chr1: | CUGCAGAAUCCCCGAAUCCA | − |
| | | | | 90973214- | 90978609- | | |
| | | | | 90982309 | 90978628 | | |
| 646 | 84146 | ZNF644 | intron_05 | chr1: | chr1: | UACAAUCUCAUCUAGAAUGA | + |
| | | | | 90973214- | 90978430- | | |
| | | | | 90982309 | 90978449 | | |
| 647 | 84146 | ZNF644 | intron_05 | chr1: | chr1: | CUUGGCAAUACAGCUGGAAA | + |
| | | | | 90973214- | 90978394- | | |
| | | | | 90982309 | 90978413 | | |
| 648 | 84146 | ZNF644 | intron_05 | chr1: | chr1: | ACUUGGCAAUACAGCUGGAA | + |
| | | | | 90973214- | 90978393- | | |
| | | | | 90982309 | 90978412 | | |
| 649 | 84146 | ZNF644 | intron_05 | chr1: | chr1: | CUGUUACUUGGCAAUACAGC | + |
| | | | | 90973214- | 90978388- | | |
| | | | | 90982309 | 90978407 | | |
| 650 | 84146 | ZNF644 | intron_05 | chr1: | chr1: | ACUAAAUACUAACUGUUACU | + |
| | | | | 90973214- | 90978376- | | |
| | | | | 90982309 | 90978395 | | |
| 651 | 84146 | ZNF644 | intron_05 | chr1: | chr1: | UGCUGUACUAUUUGCUCAUA | + |
| | | | | 90973214- | 90977999- | | |
| | | | | 90982309 | 90978018 | | |
| 652 | 84146 | ZNF644 | intron_05 | chr1: | chr1: | UGGGGAGUAUAGUGCUGGGU | + |
| | | | | 90973214- | 90977945- | | |
| | | | | 90982309 | 90977964 | | |
| 653 | 84146 | ZNF644 | intron_05 | chr1: | chr1: | AUGGGGAGUAUAGUGCUGGG | + |
| | | | | 90973214- | 90977944- | | |
| | | | | 90982309 | 90977963 | | |
| 654 | 84146 | ZNF644 | intron_05 | chr1: | chr1: | CUUAUGGGGAGUAUAGUGCU | + |
| | | | | 90973214- | 90977941- | | |
| | | | | 90982309 | 90977960 | | |
| 655 | 84146 | ZNF644 | intron_05 | chr1: | chr1: | ACUUAUGGGGAGUAUAGUGC | + |
| | | | | 90973214- | 90977940- | | |
| | | | | 90982309 | 90977959 | | |
| 656 | 84146 | ZNF644 | intron_05 | chr1: | chr1: | GCUAUUUUUGGUAACUUAUG | + |
| | | | | 90973214- | 90977927- | | |
| | | | | 90982309 | 90977946 | | |
| 657 | 84146 | ZNF644 | intron_05 | chr1: | chr1: | AGCUAUUUUUGGUAACUUAU | + |
| | | | | 90973214- | 90977926- | | |
| | | | | 90982309 | 90977945 | | |
| 658 | 84146 | ZNF644 | intron_05 | chr1: | chr1: | UUGCAGCAGUACUUAUAUAC | + |
| | | | | 90973214- | 90977780- | | |
| | | | | 90982309 | 90977799 | | |
| 659 | 84146 | ZNF644 | intron_05 | chr1: | chr1: | CUAGCAAUAAGAGUAUUAAG | + |
| | | | | 90973214- | 90977632- | | |
| | | | | 90982309 | 90977651 | | |
| 660 | 84146 | ZNF644 | intron_05 | chr1: | chr1: | UUCCACCAAUUAGACUAGCA | + |
| | | | | 90973214- | 90977561- | | |
| | | | | 90982309 | 90977580 | | |
| 661 | 84146 | ZNF644 | intron_05 | chr1: | chr1: | UAAAUUGUGAGAGUGCUCAA | − |
| | | | | 90973214- | 90977513- | | |
| | | | | 90982309 | 90977532 | | |
| 662 | 84146 | ZNF644 | intron_05 | chr1: | chr1: | CAUUACAACUUAAGUUCUGU | − |
| | | | | 90973214- | 90977474- | | |
| | | | | 90982309 | 90977493 | | |
| 663 | 84146 | ZNF644 | intron_05 | chr1: | chr1: | AUGUUAAUUGAUGGAACUGA | + |
| | | | | 90973214- | 90977410- | | |
| | | | | 90982309 | 90977429 | | |
| 664 | 84146 | ZNF644 | intron_05 | chr1: | chr1: | GUAGCUUAUCAUACAUAAUA | + |
| | | | | 90973214- | 90977095- | | |
| | | | | 90982309 | 90977114 | | |
| 665 | 84146 | ZNF644 | intron_05 | chr1: | chr1: | GAGUUCACUCACAUUAAAGC | + |
| | | | | 90973214- | 90977055- | | |
| | | | | 90982309 | 90977074 | | |
| 666 | 84146 | ZNF644 | intron_05 | chr1: | chr1: | UUAACAGCACAGUGAAACCA | + |
| | | | | 90973214- | 90976704- | | |
| | | | | 90982309 | 90976723 | | |
| 667 | 84146 | ZNF644 | intron_05 | chr1: | chr1: | AGCAUGGCUGAAACUUUCUU | + |
| | | | | 90973214- | 90976623- | | |
| | | | | 90982309 | 90976642 | | |
| 668 | 84146 | ZNF644 | intron_05 | chr1: | chr1: | AUGGUUUCCUGUUCACAUAU | + |
| | | | | 90973214- | 90976524- | | |
| | | | | 90982309 | 90976543 | | |
| 669 | 84146 | ZNF644 | intron_05 | chr1: | chr1: | GGUCUGAAGGAGCAGUUUUA | + |
| | | | | 90973214- | 90976505- | | |
| | | | | 90982309 | 90976524 | | |
| 670 | 84146 | ZNF644 | intron_05 | chr1: | chr1: | AUAGCCAUGGCAAAAUUCUU | + |
| | | | | 90973214- | 90976484- | | |
| | | | | 90982309 | 90976503 | | |
| 671 | 84146 | ZNF644 | intron_05 | chr1: | chr1: | AGAAGGCUAAAGUAUAGCCA | + |
| | | | | 90973214- | 90976471- | | |
| | | | | 90982309 | 90976490 | | |
| 672 | 84146 | ZNF644 | intron_05 | chr1: | chr1: | CAGUUUAGACCAAUCAUAGA | + |
| | | | | 90973214- | 90976454- | | |
| | | | | 90982309 | 90976473 | | |
| 673 | 84146 | ZNF644 | intron_05 | chr1: | chr1: | UAUAACUAGUUGCAUGGUAC | + |
| | | | | 90973214- | 90976326- | | |
| | | | | 90982309 | 90976345 | | |
| 674 | 84146 | ZNF644 | intron_05 | chr1: | chr1: | UGCCAGUAACUCUGGCAAUA | + |
| | | | | 90973214- | 90976064- | | |
| | | | | 90982309 | 90976083 | | |
| 675 | 84146 | ZNF644 | intron_05 | chr1: | chr1: | UAAGAAACUGCCAGUAACUC | + |
| | | | | 90973214- | 90976056- | | |
| | | | | 90982309 | 90976075 | | |
| 676 | 84146 | ZNF644 | intron_05 | chr1: | chr1: | GUCCAUAUUGCCAGAGUUAC | − |
| | | | | 90973214- | 90976069- | | |
| | | | | 90982309 | 90976088 | | |
| 677 | 84146 | ZNF644 | intron_05 | chr1: | chr1: | CAAAAUAAUGAUGAGUAUGA | + |
| | | | | 90973214- | 90975899- | | |
| | | | | 90982309 | 90975918 | | |
| 678 | 84146 | ZNF644 | intron_05 | chr1: | chr1: | ACUUUUAGGGUCUUCUAACU | − |
| | | | | 90973214- | 90975404- | | |
| | | | | 90982309 | 90975423 | | |
| 679 | 84146 | ZNF644 | intron_05 | chr1: | chr1: | UCUAACUAGGCUGAAGCCCG | − |
| | | | | 90973214- | 90975391- | | |
| | | | | 90982309 | 90975410 | | |
| 680 | 84146 | ZNF644 | intron_05 | chr1: | chr1: | CUAACUAGGCUGAAGCCCGU | − |
| | | | | 90973214- | 90975390- | | |
| | | | | 90982309 | 90975409 | | |
| 681 | 84146 | ZNF644 | intron_05 | chr1: | chr1: | GAUCACACUUUACUAGUCUG | − |
| | | | | 90973214- | 90975289- | | |
| | | | | 90982309 | 90975308 | | |
| 682 | 84146 | ZNF644 | intron_05 | chr1: | chr1: | ACUUCUACCACUCUCAAGUC | + |
| | | | | 90973214- | 90974673- | | |
| | | | | 90982309 | 90974692 | | |
| 683 | 84146 | ZNF644 | intron_05 | chr1: | chr1: | UUACAAUUAACCACCAAAGC | + |
| | | | | 90973214- | 90974598- | | |
| | | | | 90982309 | 90974617 | | |
| 684 | 84146 | ZNF644 | intron_05 | chr1: | chr1: | UCACAUCUCGAGUUAUAGAU | + |
| | | | | 90973214- | 90974377- | | |
| | | | | 90982309 | 90974396 | | |
| 685 | 84146 | ZNF644 | intron_05 | chr1: | chr1: | UCCUAAAACUUUUAUGGGAU | + |
| | | | | 90973214- | 90974015- | | |
| | | | | 90982309 | 90974034 | | |
| 686 | 84146 | ZNF644 | intron_05 | chr1: | chr1: | UAAGUCAUUCAAUUUAUAGG | + |
| | | | | 90973214- | 90973789- | | |
| | | | | 90982309 | 90973808 | | |
| 687 | 84146 | ZNF644 | intron_05 | chr1: | chr1: | AAGAGCCCGUCAUCUAUAGA | + |
| | | | | 90973214- | 90973717- | | |
| | | | | 90982309 | 90973736 | | |
| 688 | 84146 | ZNF644 | intron_05 | chr1: | chr1: | GAAGAGCCCGUCAUCUAUAG | + |
| | | | | 90973214- | 90973716- | | |
| | | | | 90982309 | 90973735 | | |
| 689 | 84146 | ZNF644 | intron_05 | chr1: | chr1: | GCAGUGCCCUCUAUAGAUGA | − |
| | | | | 90973214- | 90973726- | | |
| | | | | 90982309 | 90973745 | | |
| 690 | 84146 | ZNF644 | intron_05 | chr1: | chr1: | CAGUGCCCUCUAUAGAUGAC | − |
| | | | | 90973214- | 90973725- | | |
| | | | | 90982309 | 90973744 | | |
| 691 | 84146 | ZNF644 | intron_05 | chr1: | chr1: | AAAUAAGUCUGCAUUUAUCA | + |
| | | | | 90973214- | 90973556- | | |
| | | | | 90982309 | 90973575 | | |
| 692 | 84146 | ZNF644 | intron_05 | chr1: | chr1: | AACUACCCCGUUCAAAUCCU | + |
| | | | | 90973214- | 90973418- | | |
| | | | | 90982309 | 90973437 | | |
| 693 | 84146 | ZNF644 | intron_05 | chr1: | chr1: | GUGAGAGUAUAAUACAUAAA | + |
| | | | | 90973214- | 90973235- | | |
| | | | | 90982309 | 90973254 | | |
| 694 | 84146 | ZNF644 | intron_05 | chr1: | chr1: | UCCAGAAUAACCUGAGAGGG | + |
| | | | | 90973214- | 90973203- | | |
| | | | | 90982309 | 90973222 | | |
| 695 | 84146 | ZNF644 | intron_05 | chr1: | chr1: | UUGCUCCAGAAUAACCUGAG | + |
| | | | | 90973214- | 90973199- | | |
| | | | | 90982309 | 90973218 | | |
| 696 | 84146 | ZNF644 | exon_06_nc.1 | chr1: | chr1: | AAUUACCAAUGGGGAUGAGG | + |
| | | | | 90973153- | 90973147- | | |
| | | | | 90973213 | 90973166 | | |
| 697 | 84146 | ZNF644 | intron_06 | chr1: | chr1: | GCCACUACAGAAAACUAUGG | + |
| | | | | 90941310- | 90972536- | | |
| | | | | 90972743 | 90972555 | | |
| 698 | 84146 | ZNF644 | intron_06 | chr1: | chr1: | GCAGCCACUACAGAAAACUA | + |
| | | | | 90941310- | 90972533- | | |
| | | | | 90972743 | 90972552 | | |
| 699 | 84146 | ZNF644 | intron_06 | chr1: | chr1: | CUGGUUUCUAUCUGAUUGAA | − |
| | | | | 90941310- | 90971842- | | |
| | | | | 90972743 | 90971861 | | |
| 700 | 84146 | ZNF644 | intron_06 | chr1: | chr1: | GUUUCUAUCUGAUUGAAAGG | − |
| | | | | 90941310- | 90971839- | | |
| | | | | 90972743 | 90971858 | | |
| 701 | 84146 | ZNF644 | intron_06 | chr1: | chr1: | UUCUCAAUCUCUUUUCUACC | − |
| | | | | 90941310- | 90971106- | | |
| | | | | 90972743 | 90971125 | | |
| 702 | 84146 | ZNF644 | intron_06 | chr1: | chr1: | CUGUAUGCCUUCAUUUAUCC | + |
| | | | | 90941310- | 90971085- | | |
| | | | | 90972743 | 90971104 | | |
| 703 | 84146 | ZNF644 | intron_06 | chr1: | chr1: | AGAUAAUCACUUAUAUACCC | − |
| | | | | 90941310- | 90970729- | | |
| | | | | 90972743 | 90970748 | | |
| 704 | 84146 | ZNF644 | intron_06 | chr1: | chr1: | GCAUAUACAACCAAAUACCA | + |
| | | | | 90941310- | 90970709- | | |
| | | | | 90972743 | 90970728 | | |
| 705 | 84146 | ZNF644 | intron_06 | chr1: | chr1: | CACUUAUAUACCCUGGUAUU | − |
| | | | | 90941310- | 90970722- | | |
| | | | | 90972743 | 90970741 | | |
| 706 | 84146 | ZNF644 | intron_06 | chr1: | chr1: | AGAUUGUGCAACUCCUCCCC | + |
| | | | | 90941310- | 90970402- | | |
| | | | | 90972743 | 90970421 | | |
| 707 | 84146 | ZNF644 | intron_06 | chr1: | chr1: | GCUGUGCUUCAGAUAAACUU | + |
| | | | | 90941310- | 90970362- | | |
| | | | | 90972743 | 90970381 | | |
| 708 | 84146 | ZNF644 | intron_06 | chr1: | chr1: | GCAGACUAAUAUGCUCAACU | + |
| | | | | 90941310- | 90969905- | | |
| | | | | 90972743 | 90969924 | | |
| 709 | 84146 | ZNF644 | intron_06 | chr1: | chr1: | AGGUCUACUGUAGAUUCUUA | + |
| | | | | 90941310- | 90969874- | | |
| | | | | 90972743 | 90969893 | | |
| 710 | 84146 | ZNF644 | intron_06 | chr1: | chr1: | UUCGCAUCCACUGGAGGUAC | + |
| | | | | 90941310- | 90969828- | | |
| | | | | 90972743 | 90969847 | | |
| 711 | 84146 | ZNF644 | intron_06 | chr1: | chr1: | ACUGAGGUUUUCGCAUCCAC | + |
| | | | | 90941310- | 90969819- | | |
| | | | | 90972743 | 90969838 | | |
| 712 | 84146 | ZNF644 | intron_06 | chr1: | chr1: | UUCAAUUACCUAGUCAACUA | + |
| | | | | 90941310- | 90969445- | | |
| | | | | 90972743 | 90969464 | | |
| 713 | 84146 | ZNF644 | intron_06 | chr1: | chr1: | GUUAUUACAUUCUAAAAGUA | + |
| | | | | 90941310- | 90968930- | | |
| | | | | 90972743 | 90968949 | | |
| 714 | 84146 | ZNF644 | intron_06 | chr1: | chr1: | GUGUGACUUUUGGUUUGCUG | − |
| | | | | 90941310- | 90968886- | | |
| | | | | 90972743 | 90968905 | | |
| 715 | 84146 | ZNF644 | intron_06 | chr1: | chr1: | UUGUUGUAUCAUUAGCCUUC | + |
| | | | | 90941310- | 90968553- | | |
| | | | | 90972743 | 90968572 | | |
| 716 | 84146 | ZNF644 | intron_06 | chr1: | chr1: | AUAUAUUUCGGUUUUGGGGG | + |
| | | | | 90941310- | 90968416- | | |
| | | | | 90972743 | 90968435 | | |
| 717 | 84146 | ZNF644 | intron_06 | chr1: | chr1: | AAUAUAUUUCGGUUUUGGGG | + |
| | | | | 90941310- | 90968415- | | |
| | | | | 90972743 | 90968434 | | |
| 718 | 84146 | ZNF644 | intron_06 | chr1: | chr1: | UAAUAUAUUUCGGUUUUGGG | + |
| | | | | 90941310- | 90968414- | | |
| | | | | 90972743 | 90968433 | | |
| 719 | 84146 | ZNF644 | intron_06 | chr1: | chr1: | CUCAUGAUCAGUUAUUUUGU | + |
| | | | | 90941310- | 90968196- | | |
| | | | | 90972743 | 90968215 | | |
| 720 | 84146 | ZNF644 | intron_06 | chr1: | chr1: | GAUCAUGAGGCAUGUGAAUU | − |
| | | | | 90941310- | 90968185- | | |
| | | | | 90972743 | 90968204 | | |
| 721 | 84146 | ZNF644 | intron_06 | chr1: | chr1: | GGAUCUUUUUGUGCACUCAC | − |
| | | | | 90941310- | 90967738- | | |
| | | | | 90972743 | 90967757 | | |
| 722 | 84146 | ZNF644 | intron_06 | chr1: | chr1: | CAGACACAUUGCAUAUUUCU | + |
| | | | | 90941310- | 90967695- | | |
| | | | | 90972743 | 90967714 | | |
| 723 | 84146 | ZNF644 | intron_06 | chr1: | chr1: | UCCUAUAAUUGACUGAUAUC | − |
| | | | | 90941310- | 90967629- | | |
| | | | | 90972743 | 90967648 | | |
| 724 | 84146 | ZNF644 | intron_06 | chr1: | chr1: | GGUAGUAGUCAACCUAAUGA | + |
| | | | | 90941310- | 90967565- | | |
| | | | | 90972743 | 90967584 | | |
| 725 | 84146 | ZNF644 | intron_06 | chr1: | chr1: | UCUGUAAGAGCAUUUGUCAA | − |
| | | | | 90941310- | 90967363- | | |
| | | | | 90972743 | 90967382 | | |
| 726 | 84146 | ZNF644 | intron_06 | chr1: | chr1: | UACAUGUAGUUCCCUUGGUC | + |
| | | | | 90941310- | 90967220- | | |
| | | | | 90972743 | 90967239 | | |
| 727 | 84146 | ZNF644 | intron_06 | chr1: | chr1: | CUCUGUACAUGUAGUUCCCU | + |
| | | | | 90941310- | 90967215- | | |
| | | | | 90972743 | 90967234 | | |
| 728 | 84146 | ZNF644 | intron_06 | chr1: | chr1: | AGCUGAGCAGCUCACGUGAU | + |
| | | | | 90941310- | 90966842- | | |
| | | | | 90972743 | 90966861 | | |
| 729 | 84146 | ZNF644 | intron_06 | chr1: | chr1: | UGGGUAACGGGCCAACUUCA | + |
| | | | | 90941310- | 90966773- | | |
| | | | | 90972743 | 90966792 | | |
| 730 | 84146 | ZNF644 | intron_06 | chr1: | chr1: | AGUGUUCCAUUUUGAGCCAU | + |
| | | | | 90941310- | 90966414- | | |
| | | | | 90972743 | 90966433 | | |
| 731 | 84146 | ZNF644 | intron_06 | chr1: | chr1: | CUUUCUCAAUGUACUCAUAU | + |
| | | | | 90941310- | 90966059- | | |
| | | | | 90972743 | 90966078 | | |
| 732 | 84146 | ZNF644 | intron_06 | chr1: | chr1: | GUUAUAGUCUGAAGUAGAGG | + |
| | | | | 90941310- | 90965476- | | |
| | | | | 90972743 | 90965495 | | |
| 733 | 84146 | ZNF644 | intron_06 | chr1: | chr1: | GAGGUUAUAGUCUGAAGUAG | + |
| | | | | 90941310- | 90965473- | | |
| | | | | 90972743 | 90965492 | | |
| 734 | 84146 | ZNF644 | intron_06 | chr1: | chr1: | AGACCCUAUAUUUCCAAGUG | + |
| | | | | 90941310- | 90965454- | | |
| | | | | 90972743 | 90965473 | | |
| 735 | 84146 | ZNF644 | intron_06 | chr1: | chr1: | UCCAAGACAAAAGUACAGUA | + |
| | | | | 90941310- | 90965228- | | |
| | | | | 90972743 | 90965247 | | |
| 736 | 84146 | ZNF644 | intron_06 | chr1: | chr1: | GAUAACAGAAAAAGCUAUAC | + |
| | | | | 90941310- | 90965112- | | |
| | | | | 90972743 | 90965131 | | |
| 737 | 84146 | ZNF644 | intron_06 | chr1: | chr1: | ACCCUUGUUAAGUAUGGGGA | + |
| | | | | 90941310- | 90965037- | | |
| | | | | 90972743 | 90965056 | | |
| 738 | 84146 | ZNF644 | intron_06 | chr1: | chr1: | UGUUACCCUUGUUAAGUAUG | + |
| | | | | 90941310- | 90965033- | | |
| | | | | 90972743 | 90965052 | | |
| 739 | 84146 | ZNF644 | intron_06 | chr1: | chr1: | CUGUUACCCUUGUUAAGUAU | + |
| | | | | 90941310- | 90965032- | | |
| | | | | 90972743 | 90965051 | | |
| 740 | 84146 | ZNF644 | intron_06 | chr1: | chr1: | UCUGUUACCCUUGUUAAGUA | + |
| | | | | 90941310- | 90965031- | | |
| | | | | 90972743 | 90965050 | | |
| 741 | 84146 | ZNF644 | intron_06 | chr1: | chr1: | CUCCUUCCCCAUACUUAACA | − |
| | | | | 90941310- | 90965042- | | |
| | | | | 90972743 | 90965061 | | |
| 742 | 84146 | ZNF644 | intron_06 | chr1: | chr1: | UCCUUCCCCAUACUUAACAA | − |
| | | | | 90941310- | 90965041- | | |
| | | | | 90972743 | 90965060 | | |
| 743 | 84146 | ZNF644 | intron_06 | chr1: | chr1: | AGAUUGUUAUGAAACGUUCC | − |
| | | | | 90941310- | 90965014- | | |
| | | | | 90972743 | 90965033 | | |
| 744 | 84146 | ZNF644 | intron_06 | chr1: | chr1: | UUAUGUCUUCUAAGGAAAUG | − |
| | | | | 90941310- | 90964937- | | |
| | | | | 90972743 | 90964956 | | |
| 745 | 84146 | ZNF644 | intron_06 | chr1: | chr1: | AUGUCUUCUAAGGAAAUGUG | − |
| | | | | 90941310- | 90964935- | | |
| | | | | 90972743 | 90964954 | | |
| 746 | 84146 | ZNF644 | intron_06 | chr1: | chr1: | AGCAACAGAAAAAGCUAUAC | + |
| | | | | 90941310- | 90964681- | | |
| | | | | 90972743 | 90964700 | | |
| 747 | 84146 | ZNF644 | intron_06 | chr1: | chr1: | GUUGCUUCAGUGUGGUAUUU | − |
| | | | | 90941310- | 90964667- | | |
| | | | | 90972743 | 90964686 | | |
| 748 | 84146 | ZNF644 | intron_06 | chr1: | chr1: | AAGAAUUUGUUACCACUUGG | − |
| | | | | 90941310- | 90964641- | | |
| | | | | 90972743 | 90964660 | | |
| 749 | 84146 | ZNF644 | intron_06 | chr1: | chr1: | AGCCACAUAGUGCCACCAAG | + |
| | | | | 90941310- | 90964626- | | |
| | | | | 90972743 | 90964645 | | |
| 750 | 84146 | ZNF644 | intron_06 | chr1: | chr1: | GCAAUUAACUAUACUGUUCU | − |
| | | | | 90941310- | 90964585- | | |
| | | | | 90972743 | 90964604 | | |
| 751 | 84146 | ZNF644 | intron_06 | chr1: | chr1: | CUACCCAACAAACUAAGCCU | + |
| | | | | 90941310- | 90964428- | | |
| | | | | 90972743 | 90964447 | | |
| 752 | 84146 | ZNF644 | intron_06 | chr1: | chr1: | UAAACCAAGGCUUAGUUUGU | − |
| | | | | 90941310- | 90964435- | | |
| | | | | 90972743 | 90964454 | | |
| 753 | 84146 | ZNF644 | intron_06 | chr1: | chr1: | CAAGGCUUAGUUUGUUGGGU | − |
| | | | | 90941310- | 90964430- | | |
| | | | | 90972743 | 90964449 | | |
| 754 | 84146 | ZNF644 | intron_06 | chr1: | chr1: | AAGGCUUAGUUUGUUGGGUA | − |
| | | | | 90941310- | 90964429- | | |
| | | | | 90972743 | 90964448 | | |
| 755 | 84146 | ZNF644 | intron_06 | chr1: | chr1: | AUAAAUGACACCUGACCUAA | + |
| | | | | 90941310- | 90964376- | | |
| | | | | 90972743 | 90964395 | | |
| 756 | 84146 | ZNF644 | intron_06 | chr1: | chr1: | AUAGAAACCUCCUUUAGGUC | − |
| | | | | 90941310- | 90964389- | | |
| | | | | 90972743 | 90964408 | | |
| 757 | 84146 | ZNF644 | intron_06 | chr1: | chr1: | CUCACAUUUAGACAAAGAAG | + |
| | | | | 90941310- | 90964339- | | |
| | | | | 90972743 | 90964358 | | |
| 758 | 84146 | ZNF644 | intron_06 | chr1: | chr1: | UCUCACAUUUAGACAAAGAA | + |
| | | | | 90941310- | 90964338- | | |
| | | | | 90972743 | 90964357 | | |
| 759 | 84146 | ZNF644 | intron_06 | chr1: | chr1: | GGUAUUAGAUGUCAAGUGCU | + |
| | | | | 90941310- | 90964016- | | |
| | | | | 90972743 | 90964035 | | |
| 760 | 84146 | ZNF644 | intron_06 | chr1: | chr1: | CACAAAUACCUUAACAAUUA | + |
| | | | | 90941310- | 90963995- | | |
| | | | | 90972743 | 90964014 | | |
| 761 | 84146 | ZNF644 | intron_06 | chr1: | chr1: | UUCUCGAUCUGUGGUGGUCA | + |
| | | | | 90941310- | 90963832- | | |
| | | | | 90972743 | 90963851 | | |
| 762 | 84146 | ZNF644 | intron_06 | chr1: | chr1: | ACAAUUUGUCAUGUUACUGU | − |
| | | | | 90941310- | 90963569- | | |
| | | | | 90972743 | 90963588 | | |
| 763 | 84146 | ZNF644 | intron_06 | chr1: | chr1: | UAUUCAAUUCCAUUUGGAUC | + |
| | | | | 90941310- | 90963269- | | |
| | | | | 90972743 | 90963288 | | |
| 764 | 84146 | ZNF644 | intron_06 | chr1: | chr1: | CAACCAGUACAUUUAUGAAA | + |
| | | | | 90941310- | 90963246- | | |
| | | | | 90972743 | 90963265 | | |
| 765 | 84146 | ZNF644 | intron_06 | chr1: | chr1: | ACAACCAGUACAUUUAUGAA | + |
| | | | | 90941310- | 90963245- | | |
| | | | | 90972743 | 90963264 | | |
| 766 | 84146 | ZNF644 | intron_06 | chr1: | chr1: | GAGAAGAGACGUUGCAAAAA | + |
| | | | | 90941310- | 90963214- | | |
| | | | | 90972743 | 90963233 | | |
| 767 | 84146 | ZNF644 | intron_06 | chr1: | chr1: | UUUGUUAAGGUGGUGAGGAU | + |
| | | | | 90941310- | 90963192- | | |
| | | | | 90972743 | 90963211 | | |
| 768 | 84146 | ZNF644 | intron_06 | chr1: | chr1: | AAAAGUACAGAAACUCCAAU | + |
| | | | | 90941310- | 90963100- | | |
| | | | | 90972743 | 90963119 | | |
| 769 | 84146 | ZNF644 | intron_06 | chr1: | chr1: | AAAUGUCCCACCCAGAUGGU | + |
| | | | | 90941310- | 90962780- | | |
| | | | | 90972743 | 90962799 | | |
| 770 | 84146 | ZNF644 | intron_06 | chr1: | chr1: | UGCCAAAUGUCCCACCCAGA | + |
| | | | | 90941310- | 90962776- | | |
| | | | | 90972743 | 90962795 | | |
| 771 | 84146 | ZNF644 | intron_06 | chr1: | chr1: | CUCACCCACUAGUGACACCC | + |
| | | | | 90941310- | 90962614- | | |
| | | | | 90972743 | 90962633 | | |
| 772 | 84146 | ZNF644 | intron_06 | chr1: | chr1: | AAGAACAAGGUAGGCCUUAG | + |
| | | | | 90941310- | 90962209- | | |
| | | | | 90972743 | 90962228 | | |
| 773 | 84146 | ZNF644 | intron_06 | chr1: | chr1: | GACUGAAAUUCUUUCUUCUC | − |
| | | | | 90941310- | 90962050- | | |
| | | | | 90972743 | 90962069 | | |
| 774 | 84146 | ZNF644 | intron_06 | chr1: | chr1: | UCAACUGGAAUCAAUACACU | + |
| | | | | 90941310- | 90961786- | | |
| | | | | 90972743 | 90961805 | | |
| 775 | 84146 | ZNF644 | intron_06 | chr1: | chr1: | CAUCCCUAAGACCUUAUUAG | + |
| | | | | 90941310- | 90961417- | | |
| | | | | 90972743 | 90961436 | | |
| 776 | 84146 | ZNF644 | intron_06 | chr1: | chr1: | GUGUGAGUUGUGGGGCCCAG | + |
| | | | | 90941310- | 90961393- | | |
| | | | | 90972743 | 90961412 | | |
| 777 | 84146 | ZNF644 | intron_06 | chr1: | chr1: | GUUUGAUUAAAUUAGGUCAA | + |
| | | | | 90941310- | 90961334- | | |
| | | | | 90972743 | 90961353 | | |
| 778 | 84146 | ZNF644 | intron_06 | chr1: | chr1: | AGUUUGAUUAAAUUAGGUCA | + |
| | | | | 90941310- | 90961333- | | |
| | | | | 90972743 | 90961352 | | |
| 779 | 84146 | ZNF644 | intron_06 | chr1: | chr1: | AUUAACAGUUUGAUUAAAUU | + |
| | | | | 90941310- | 90961327- | | |
| | | | | 90972743 | 90961346 | | |
| 780 | 84146 | ZNF644 | intron_06 | chr1: | chr1: | AGUAAGGGGUACAGUAUGGA | + |
| | | | | 90941310- | 90961205- | | |
| | | | | 90972743 | 90961224 | | |
| 781 | 84146 | ZNF644 | intron_06 | chr1: | chr1: | GUGGCAAAUAAGUUGAGUAA | + |
| | | | | 90941310- | 90961190- | | |
| | | | | 90972743 | 90961209 | | |
| 782 | 84146 | ZNF644 | intron_06 | chr1: | chr1: | AGUGGCAAAUAAGUUGAGUA | + |
| | | | | 90941310- | 90961189- | | |
| | | | | 90972743 | 90961208 | | |
| 783 | 84146 | ZNF644 | intron_06 | chr1: | chr1: | CAUGGUGGCUAAAAUAUAUA | + |
| | | | | 90941310- | 90961145- | | |
| | | | | 90972743 | 90961164 | | |
| 784 | 84146 | ZNF644 | intron_06 | chr1: | chr1: | ACGAUGAUGACGUUUCAUGG | + |
| | | | | 90941310- | 90961130- | | |
| | | | | 90972743 | 90961149 | | |
| 785 | 84146 | ZNF644 | intron_06 | chr1: | chr1: | AAAACGAUGAUGACGUUUCA | + |
| | | | | 90941310- | 90961127- | | |
| | | | | 90972743 | 90961146 | | |
| 786 | 84146 | ZNF644 | intron_06 | chr1: | chr1: | CACUACAGACCUACACUAAA | + |
| | | | | 90941310- | 90960991- | | |
| | | | | 90972743 | 90961010 | | |
| 787 | 84146 | ZNF644 | intron_06 | chr1: | chr1: | CAAGAAUCAUCCAAAAGUGA | + |
| | | | | 90941310- | 90960923- | | |
| | | | | 90972743 | 90960942 | | |
| 788 | 84146 | ZNF644 | intron_06 | chr1: | chr1: | ACAAGAAUCAUCCAAAAGUG | + |
| | | | | 90941310- | 90960922- | | |
| | | | | 90972743 | 90960941 | | |
| 789 | 84146 | ZNF644 | intron_06 | chr1: | chr1: | AAUUUCUCAACAGAAACAGA | + |
| | | | | 90941310- | 90960837- | | |
| | | | | 90972743 | 90960856 | | |
| 790 | 84146 | ZNF644 | intron_06 | chr1: | chr1: | GUCCUGACGACACCCAAUCU | + |
| | | | | 90941310- | 90960610- | | |
| | | | | 90972743 | 90960629 | | |
| 791 | 84146 | ZNF644 | intron_06 | chr1: | chr1: | GUACACUCUAUGGAUAAAGA | + |
| | | | | 90941310- | 90960482- | | |
| | | | | 90972743 | 90960501 | | |
| 792 | 84146 | ZNF644 | intron_06 | chr1: | chr1: | GUCUUCAAAUGUACACUCUA | + |
| | | | | 90941310- | 90960472- | | |
| | | | | 90972743 | 90960491 | | |
| 793 | 84146 | ZNF644 | intron_06 | chr1: | chr1: | GUGUCUGACUGACAGCAAUA | + |
| | | | | 90941310- | 90960413- | | |
| | | | | 90972743 | 90960432 | | |
| 794 | 84146 | ZNF644 | intron_06 | chr1: | chr1: | AGCUGCAAAAGUUAUGAACG | + |
| | | | | 90941310- | 90960322- | | |
| | | | | 90972743 | 90960341 | | |
| 795 | 84146 | ZNF644 | intron_06 | chr1: | chr1: | UACUCGCUGAAUUGGUAAGA | + |
| | | | | 90941310- | 90960262- | | |
| | | | | 90972743 | 90960281 | | |
| 796 | 84146 | ZNF644 | intron_06 | chr1: | chr1: | GCCGUUUCCUUUACAUAAAA | + |
| | | | | 90941310- | 90960171- | | |
| | | | | 90972743 | 90960190 | | |
| 797 | 84146 | ZNF644 | intron_06 | chr1: | chr1: | CUUGCACCAUCCCACUCAGA | + |
| | | | | 90941310- | 90959957- | | |
| | | | | 90972743 | 90959976 | | |
| 798 | 84146 | ZNF644 | intron_06 | chr1: | chr1: | UCUUGCACCAUCCCACUCAG | + |
| | | | | 90941310- | 90959956- | | |
| | | | | 90972743 | 90959975 | | |
| 799 | 84146 | ZNF644 | intron_06 | chr1: | chr1: | GGUUUUAAAUUGCUAUUCUA | + |
| | | | | 90941310- | 90959921- | | |
| | | | | 90972743 | 90959940 | | |
| 800 | 84146 | ZNF644 | intron_06 | chr1: | chr1: | GAAUACGCAGUGUUUUUAUG | + |
| | | | | 90941310- | 90959741- | | |
| | | | | 90972743 | 90959760 | | |
| 801 | 84146 | ZNF644 | intron_06 | chr1: | chr1: | UGAAUACGCAGUGUUUUUAU | + |
| | | | | 90941310- | 90959740- | | |
| | | | | 90972743 | 90959759 | | |
| 802 | 84146 | ZNF644 | intron_06 | chr1: | chr1: | AUGAAUACGCAGUGUUUUUA | + |
| | | | | 90941310- | 90959739- | | |
| | | | | 90972743 | 90959758 | | |
| 803 | 84146 | ZNF644 | intron_06 | chr1: | chr1: | CUUUACCAGGUGAUGGAAGG | + |
| | | | | 90941310- | 90959695- | | |
| | | | | 90972743 | 90959714 | | |
| 804 | 84146 | ZNF644 | intron_06 | chr1: | chr1: | ACUUUACCAGGUGAUGGAAG | + |
| | | | | 90941310- | 90959694- | | |
| | | | | 90972743 | 90959713 | | |
| 805 | 84146 | ZNF644 | intron_06 | chr1: | chr1: | UACUUUACCAGGUGAUGGAA | + |
| | | | | 90941310- | 90959693- | | |
| | | | | 90972743 | 90959712 | | |
| 806 | 84146 | ZNF644 | intron_06 | chr1: | chr1: | CAAUGCCUAGAUAUACAUCC | + |
| | | | | 90941310- | 90959387- | | |
| | | | | 90972743 | 90959406 | | |
| 807 | 84146 | ZNF644 | intron_06 | chr1: | chr1: | AUAAGUAUGGAUAAUAAGUU | + |
| | | | | 90941310- | 90959318- | | |
| | | | | 90972743 | 90959337 | | |
| 808 | 84146 | ZNF644 | intron_06 | chr1: | chr1: | GAUCCUCAUGACUCUUGAUU | + |
| | | | | 90941310- | 90958883- | | |
| | | | | 90972743 | 90958902 | | |
| 809 | 84146 | ZNF644 | intron_06 | chr1: | chr1: | UUGGAAGCCUGUCUCACACC | + |
| | | | | 90941310- | 90958782- | | |
| | | | | 90972743 | 90958801 | | |
| 810 | 84146 | ZNF644 | intron_06 | chr1: | chr1: | UCAAUGUGGCAGUAGAAGCA | + |
| | | | | 90941310- | 90958593- | | |
| | | | | 90972743 | 90958612 | | |
| 811 | 84146 | ZNF644 | intron_06 | chr1: | chr1: | AUCAAUGUGGCAGUAGAAGC | + |
| | | | | 90941310- | 90958592- | | |
| | | | | 90972743 | 90958611 | | |
| 812 | 84146 | ZNF644 | intron_06 | chr1: | chr1: | ACAUUGCUAGAAAAACUUAA | + |
| | | | | 90941310- | 90958308- | | |
| | | | | 90972743 | 90958327 | | |
| 813 | 84146 | ZNF644 | intron_06 | chr1: | chr1: | GUGUAACCUCAUGACCAGCC | + |
| | | | | 90941310- | 90958058- | | |
| | | | | 90972743 | 90958077 | | |
| 814 | 84146 | ZNF644 | intron_06 | chr1: | chr1: | UGGAAAAAUCCAGGACUAUG | + |
| | | | | 90941310- | 90957173- | | |
| | | | | 90972743 | 90957192 | | |
| 815 | 84146 | ZNF644 | intron_06 | chr1: | chr1: | AACAGAAUACUAUGAAUAAC | + |
| | | | | 90941310- | 90957004- | | |
| | | | | 90972743 | 90957023 | | |
| 816 | 84146 | ZNF644 | intron_06 | chr1: | chr1: | AAGCUGAGAUAAACUUACAC | − |
| | | | | 90941310- | 90956421- | | |
| | | | | 90972743 | 90956440 | | |
| 817 | 84146 | ZNF644 | intron_06 | chr1: | chr1: | UCAGUUCACUAUCUUGGAUU | + |
| | | | | 90941310- | 90956139- | | |
| | | | | 90972743 | 90956158 | | |
| 818 | 84146 | ZNF644 | intron_06 | chr1: | chr1: | UCCUCACUAAGCUUAAUUCU | + |
| | | | | 90941310- | 90955922- | | |
| | | | | 90972743 | 90955941 | | |
| 819 | 84146 | ZNF644 | intron_06 | chr1: | chr1: | UGAGCUUUUAUGUUAUAACA | + |
| | | | | 90941310- | 90955556- | | |
| | | | | 90972743 | 90955575 | | |
| 820 | 84146 | ZNF644 | intron_06 | chr1: | chr1: | UUGUCAGAGCUAGAUCUCCU | + |
| | | | | 90941310- | 90955491- | | |
| | | | | 90972743 | 90955510 | | |
| 821 | 84146 | ZNF644 | intron_06 | chr1: | chr1: | CAGGCUUCAGUUUUGAAGCC | + |
| | | | | 90941310- | 90955360- | | |
| | | | | 90972743 | 90955379 | | |
| 822 | 84146 | ZNF644 | intron_06 | chr1: | chr1: | UUCAUAAACCAUGCUGUAAC | + |
| | | | | 90941310- | 90955179- | | |
| | | | | 90972743 | 90955198 | | |
| 823 | 84146 | ZNF644 | intron_06 | chr1: | chr1: | UCAAUGAGCAUAUUUCGAAA | + |
| | | | | 90941310- | 90955117- | | |
| | | | | 90972743 | 90955136 | | |
| 824 | 84146 | ZNF644 | intron_06 | chr1: | chr1: | CUUAAUAUUGACAAUCAGAG | + |
| | | | | 90941310- | 90954029- | | |
| | | | | 90972743 | 90954048 | | |
| 825 | 84146 | ZNF644 | intron_06 | chr1: | chr1: | UAAAGUAUUCUAUUGUAGCU | + |
| | | | | 90941310- | 90953618- | | |
| | | | | 90972743 | 90953637 | | |
| 826 | 84146 | ZNF644 | intron_06 | chr1: | chr1: | UUAAAGUAUUCUAUUGUAGC | + |
| | | | | 90941310- | 90953617- | | |
| | | | | 90972743 | 90953636 | | |
| 827 | 84146 | ZNF644 | intron_06 | chr1: | chr1: | GCUAUUAUGUCUAAAAAGCA | + |
| | | | | 90941310- | 90953586- | | |
| | | | | 90972743 | 90953605 | | |
| 828 | 84146 | ZNF644 | intron_06 | chr1: | chr1: | CAUGGAGAGGGGAACACACU | + |
| | | | | 90941310- | 90953351- | | |
| | | | | 90972743 | 90953370 | | |
| 829 | 84146 | ZNF644 | intron_06 | chr1: | chr1: | UACAUUUAACAGACAUGGAG | + |
| | | | | 90941310- | 90953338- | | |
| | | | | 90972743 | 90953357 | | |
| 830 | 84146 | ZNF644 | intron_06 | chr1: | chr1: | GAUAGCAUGAGAUUAGCUCU | − |
| | | | | 90941310- | 90953048- | | |
| | | | | 90972743 | 90953067 | | |
| 831 | 84146 | ZNF644 | intron_06 | chr1: | chr1: | GAGAUUAGCUCUUGGACAUC | − |
| | | | | 90941310- | 90953040- | | |
| | | | | 90972743 | 90953059 | | |
| 832 | 84146 | ZNF644 | intron_06 | chr1: | chr1: | AAGAGACAACAAUUAGACUG | + |
| | | | | 90941310- | 90952991- | | |
| | | | | 90972743 | 90953010 | | |
| 833 | 84146 | ZNF644 | intron_06 | chr1: | chr1: | CACAUCAAGCCAAAGCUUCU | + |
| | | | | 90941310- | 90952841- | | |
| | | | | 90972743 | 90952860 | | |
| 834 | 84146 | ZNF644 | intron_06 | chr1: | chr1: | ACACAUCAAGCCAAAGCUUC | + |
| | | | | 90941310- | 90952840- | | |
| | | | | 90972743 | 90952859 | | |
| 835 | 84146 | ZNF644 | intron_06 | chr1: | chr1: | CAUCUAGUUGGAAUCCCGGA | + |
| | | | | 90941310- | 90952746- | | |
| | | | | 90972743 | 90952765 | | |
| 836 | 84146 | ZNF644 | intron_06 | chr1: | chr1: | CAUACAUUCCAACAUCUAGU | + |
| | | | | 90941310- | 90952734- | | |
| | | | | 90972743 | 90952753 | | |
| 837 | 84146 | ZNF644 | intron_06 | chr1: | chr1: | AAAGUAUAUUGAAUGAAGCA | + |
| | | | | 90941310- | 90952646- | | |
| | | | | 90972743 | 90952665 | | |
| 838 | 84146 | ZNF644 | intron_06 | chr1: | chr1: | UACAUAGUGGCCAGAGCAUA | − |
| | | | | 90941310- | 90952566- | | |
| | | | | 90972743 | 90952585 | | |
| 839 | 84146 | ZNF644 | intron_06 | chr1: | chr1: | UUCUGUUGGAAGCUUCUCAG | − |
| | | | | 90941310- | 90952526- | | |
| | | | | 90972743 | 90952545 | | |
| 840 | 84146 | ZNF644 | intron_06 | chr1: | chr1: | GAGAGGUCUAUACAACAACU | + |
| | | | | 90941310- | 90952447- | | |
| | | | | 90972743 | 90952466 | | |
| 841 | 84146 | ZNF644 | intron_06 | chr1: | chr1: | CUGAUCAAACAUAUAGGGAG | + |
| | | | | 90941310- | 90952430- | | |
| | | | | 90972743 | 90952449 | | |
| 842 | 84146 | ZNF644 | intron_06 | chr1: | chr1: | CUUGGUUUAGCUGUAAAGAC | + |
| | | | | 90941310- | 90952186- | | |
| | | | | 90972743 | 90952205 | | |
| 843 | 84146 | ZNF644 | intron_06 | chr1: | chr1: | GAAGCCAUUUUUACUGACAA | + |
| | | | | 90941310- | 90952158- | | |
| | | | | 90972743 | 90952177 | | |
| 844 | 84146 | ZNF644 | intron_06 | chr1: | chr1: | UAAUUCUAAGACUGGGAGUC | − |
| | | | | 90941310- | 90952076- | | |
| | | | | 90972743 | 90952095 | | |
| 845 | 84146 | ZNF644 | intron_06 | chr1: | chr1: | UUAAUCAAAAAACAGCUCAA | + |
| | | | | 90941310- | 90951995- | | |
| | | | | 90972743 | 90952014 | | |
| 846 | 84146 | ZNF644 | intron_06 | chr1: | chr1: | GUUAAUCAAAAAACAGCUCA | + |
| | | | | 90941310- | 90951994- | | |
| | | | | 90972743 | 90952013 | | |
| 847 | 84146 | ZNF644 | intron_06 | chr1: | chr1: | CACAUAAUAGGAAAAUUUGA | + |
| | | | | 90941310- | 90951958- | | |
| | | | | 90972743 | 90951977 | | |
| 848 | 84146 | ZNF644 | intron_06 | chr1: | chr1: | AAUGGCCUUCUGUCUGCCUA | − |
| | | | | 90941310- | 90951929- | | |
| | | | | 90972743 | 90951948 | | |
| 849 | 84146 | ZNF644 | intron_06 | chr1: | chr1: | CUUGCUAACUGAAUACCUCA | + |
| | | | | 90941310- | 90951805- | | |
| | | | | 90972743 | 90951824 | | |
| 850 | 84146 | ZNF644 | intron_06 | chr1: | chr1: | CCUCUAAUACUAAGUUUCAC | + |
| | | | | 90941310- | 90951765- | | |
| | | | | 90972743 | 90951784 | | |
| 851 | 84146 | ZNF644 | intron_06 | chr1: | chr1: | AUAUGUUCUCUACUAGCGUA | + |
| | | | | 90941310- | 90951453- | | |
| | | | | 90972743 | 90951472 | | |
| 852 | 84146 | ZNF644 | intron_06 | chr1: | chr1: | ACUAAUCUGGUAUUAGUACA | + |
| | | | | 90941310- | 90951166- | | |
| | | | | 90972743 | 90951185 | | |
| 853 | 84146 | ZNF644 | intron_06 | chr1: | chr1: | CUGCUAUACCCAGAUCCACU | + |
| | | | | 90941310- | 90951130- | | |
| | | | | 90972743 | 90951149 | | |
| 854 | 84146 | ZNF644 | intron_06 | chr1: | chr1: | CUCAUCUAUAUCAGUUGUUC | + |
| | | | | 90941310- | 90950988- | | |
| | | | | 90972743 | 90951007 | | |
| 855 | 84146 | ZNF644 | intron_06 | chr1: | chr1: | ACUAAGGUUGAUCUGAACAG | + |
| | | | | 90941310- | 90950734- | | |
| | | | | 90972743 | 90950753 | | |
| 856 | 84146 | ZNF644 | intron_06 | chr1: | chr1: | GCUUUAAACGAUUCUCCCAA | + |
| | | | | 90941310- | 90950650- | | |
| | | | | 90972743 | 90950669 | | |
| 857 | 84146 | ZNF644 | intron_06 | chr1: | chr1: | AGAGAUAUUCAUGAAUCUCU | + |
| | | | | 90941310- | 90950540- | | |
| | | | | 90972743 | 90950559 | | |
| 858 | 84146 | ZNF644 | intron_06 | chr1: | chr1: | AGGAUAUUAAGUACUAGGCC | + |
| | | | | 90941310- | 90950486- | | |
| | | | | 90972743 | 90950505 | | |
| 859 | 84146 | ZNF644 | intron_06 | chr1: | chr1: | ACCUGAGGAUAUUAAGUACU | + |
| | | | | 90941310- | 90950481- | | |
| | | | | 90972743 | 90950500 | | |
| 860 | 84146 | ZNF644 | intron_06 | chr1: | chr1: | GCCUAGUACUUAAUAUCCUC | − |
| | | | | 90941310- | 90950485- | | |
| | | | | 90972743 | 90950504 | | |
| 861 | 84146 | ZNF644 | intron_06 | chr1: | chr1: | AUACUAGUUUACAGAACCUG | + |
| | | | | 90941310- | 90950466- | | |
| | | | | 90972743 | 90950485 | | |
| 862 | 84146 | ZNF644 | intron_06 | chr1: | chr1: | CACAAUCUGCUUUUGGGAGG | − |
| | | | | 90941310- | 90950430- | | |
| | | | | 90972743 | 90950449 | | |
| 863 | 84146 | ZNF644 | intron_06 | chr1: | chr1: | AAAAAAUAGCGCUGGGGCCG | + |
| | | | | 90941310- | 90949981- | | |
| | | | | 90972743 | 90950000 | | |
| 864 | 84146 | ZNF644 | intron_06 | chr1: | chr1: | GAUUCAAAAAAAUAGCGCUG | + |
| | | | | 90941310- | 90949975- | | |
| | | | | 90972743 | 90949994 | | |
| 865 | 84146 | ZNF644 | intron_06 | chr1: | chr1: | UGAUUCAAAAAAAUAGCGCU | + |
| | | | | 90941310- | 90949974- | | |
| | | | | 90972743 | 90949993 | | |
| 866 | 84146 | ZNF644 | intron_06 | chr1: | chr1: | UUGAUUCAAAAAAAUAGCGC | + |
| | | | | 90941310- | 90949973- | | |
| | | | | 90972743 | 90949992 | | |
| 867 | 84146 | ZNF644 | intron_06 | chr1: | chr1: | GAUUCAGGAACGGUGUUUGG | − |
| | | | | 90941310- | 90949935- | | |
| | | | | 90972743 | 90949954 | | |
| 868 | 84146 | ZNF644 | intron_06 | chr1: | chr1: | CAUUCUCCUUAGCCACAUAC | − |
| | | | | 90941310- | 90949902- | | |
| | | | | 90972743 | 90949921 | | |
| 869 | 84146 | ZNF644 | intron_06 | chr1: | chr1: | AUUCUCCUUAGCCACAUACU | − |
| | | | | 90941310- | 90949901- | | |
| | | | | 90972743 | 90949920 | | |
| 870 | 84146 | ZNF644 | intron_06 | chr1: | chr1: | GCAAUAGGAUUCCCAGUAUG | + |
| | | | | 90941310- | 90949887- | | |
| | | | | 90972743 | 90949906 | | |
| 871 | 84146 | ZNF644 | intron_06 | chr1: | chr1: | AUUUGCGUGUUUUUAGCAAU | + |
| | | | | 90941310- | 90949872- | | |
| | | | | 90972743 | 90949891 | | |
| 872 | 84146 | ZNF644 | intron_06 | chr1: | chr1: | GUAAAGGUCUGGAGCAUCAU | + |
| | | | | 90941310- | 90949761- | | |
| | | | | 90972743 | 90949780 | | |
| 873 | 84146 | ZNF644 | intron_06 | chr1: | chr1: | UAUUACAAGAAAUAUAUUGA | + |
| | | | | 90941310- | 90949682- | | |
| | | | | 90972743 | 90949701 | | |
| 874 | 84146 | ZNF644 | intron_06 | chr1: | chr1: | UUCUACAAGUAUCUUAAUUU | + |
| | | | | 90941310- | 90949423- | | |
| | | | | 90972743 | 90949442 | | |
| 875 | 84146 | ZNF644 | intron_06 | chr1: | chr1: | AGUUUGAAUGUAUAUAAUAC | − |
| | | | | 90941310- | 90949150- | | |
| | | | | 90972743 | 90949169 | | |
| 876 | 84146 | ZNF644 | intron_06 | chr1: | chr1: | CAAUUUAAUCUAUUGAAGGA | + |
| | | | | 90941310- | 90949061- | | |
| | | | | 90972743 | 90949080 | | |
| 877 | 84146 | ZNF644 | intron_06 | chr1: | chr1: | UCAGUGAAAUAAUUCAAUCC | − |
| | | | | 90941310- | 90949037- | | |
| | | | | 90972743 | 90949056 | | |
| 878 | 84146 | ZNF644 | intron_06 | chr1: | chr1: | ACUUGAAUAAUAUGACAUCC | + |
| | | | | 90941310- | 90949016- | | |
| | | | | 90972743 | 90949035 | | |
| 879 | 84146 | ZNF644 | intron_06 | chr1: | chr1: | UUCGUUAUGUUCCAAGCAUC | − |
| | | | | 90941310- | 90948805- | | |
| | | | | 90972743 | 90948824 | | |
| 880 | 84146 | ZNF644 | intron_06 | chr1: | chr1: | AAGCAUCAGGCUAGACAUGC | − |
| | | | | 90941310- | 90948792- | | |
| | | | | 90972743 | 90948811 | | |
| 881 | 84146 | ZNF644 | intron_06 | chr1: | chr1: | CAUGCUGGUAAGGGUUCUGU | − |
| | | | | 90941310- | 90948777- | | |
| | | | | 90972743 | 90948796 | | |
| 882 | 84146 | ZNF644 | intron_06 | chr1: | chr1: | CCCGCACUUGACACCAUCUA | + |
| | | | | 90941310- | 90948541- | | |
| | | | | 90972743 | 90948560 | | |
| 883 | 84146 | ZNF644 | intron_06 | chr1: | chr1: | UCCGCAUUAACAAUCUGUUA | − |
| | | | | 90941310- | 90948438- | | |
| | | | | 90972743 | 90948457 | | |
| 884 | 84146 | ZNF644 | intron_06 | chr1: | chr1: | UGCAAACAUGGUGGCUUUAA | + |
| | | | | 90941310- | 90948379- | | |
| | | | | 90972743 | 90948398 | | |
| 885 | 84146 | ZNF644 | intron_06 | chr1: | chr1: | CCCAACCAUGUAUAUUCCAC | + |
| | | | | 90941310- | 90948306- | | |
| | | | | 90972743 | 90948325 | | |
| 886 | 84146 | ZNF644 | intron_06 | chr1: | chr1: | UCCUGUGGAAUAUACAUGGU | − |
| | | | | 90941310- | 90948310- | | |
| | | | | 90972743 | 90948329 | | |
| 887 | 84146 | ZNF644 | intron_06 | chr1: | chr1: | CUGUGGAAUAUACAUGGUUG | − |
| | | | | 90941310- | 90948308- | | |
| | | | | 90972743 | 90948327 | | |
| 888 | 84146 | ZNF644 | intron_06 | chr1: | chr1: | AUCAUUGUCAUUGUAAGUCA | + |
| | | | | 90941310- | 90947960- | | |
| | | | | 90972743 | 90947979 | | |
| 889 | 84146 | ZNF644 | intron_06 | chr1: | chr1: | AUAAACAGCAGACCCAUCAU | − |
| | | | | 90941310- | 90947588- | | |
| | | | | 90972743 | 90947607 | | |
| 890 | 84146 | ZNF644 | intron_06 | chr1: | chr1: | GGUAUUCUUUAACCUAUGAU | + |
| | | | | 90941310- | 90947573- | | |
| | | | | 90972743 | 90947592 | | |
| 891 | 84146 | ZNF644 | intron_06 | chr1: | chr1: | UGGUAUUCUUUAACCUAUGA | + |
| | | | | 90941310- | 90947572- | | |
| | | | | 90972743 | 90947591 | | |
| 892 | 84146 | ZNF644 | intron_06 | chr1: | chr1: | GGCAUAAUACUUUCUGUGGA | − |
| | | | | 90941310- | 90947524- | | |
| | | | | 90972743 | 90947543 | | |
| 893 | 84146 | ZNF644 | intron_06 | chr1: | chr1: | CAAAGUUGACACACUGCCCC | − |
| | | | | 90941310- | 90947501- | | |
| | | | | 90972743 | 90947520 | | |
| 894 | 84146 | ZNF644 | intron_06 | chr1: | chr1: | AUGUCAAUCCCAUACUCCAG | + |
| | | | | 90941310- | 90947482- | | |
| | | | | 90972743 | 90947501 | | |
| 895 | 84146 | ZNF644 | intron_06 | chr1: | chr1: | GACACACUGCCCCUGGAGUA | − |
| | | | | 90941310- | 90947494- | | |
| | | | | 90972743 | 90947513 | | |
| 896 | 84146 | ZNF644 | intron_06 | chr1: | chr1: | ACACACUGCCCCUGGAGUAU | − |
| | | | | 90941310- | 90947493- | | |
| | | | | 90972743 | 90947512 | | |
| 897 | 84146 | ZNF644 | intron_06 | chr1: | chr1: | AGUAUGGGAUUGACAUACUU | − |
| | | | | 90941310- | 90947478- | | |
| | | | | 90972743 | 90947497 | | |
| 898 | 84146 | ZNF644 | intron_06 | chr1: | chr1: | UGACCACAUUUGUGUAACAU | + |
| | | | | 90941310- | 90947387- | | |
| | | | | 90972743 | 90947406 | | |
| 899 | 84146 | ZNF644 | intron_06 | chr1: | chr1: | UGACCCAUGUUACACAAAUG | − |
| | | | | 90941310- | 90947393- | | |
| | | | | 90972743 | 90947412 | | |
| 900 | 84146 | ZNF644 | intron_06 | chr1: | chr1: | GUAAUAGACAUAUAUGCACG | + |
| | | | | 90941310- | 90947294- | | |
| | | | | 90972743 | 90947313 | | |
| 901 | 84146 | ZNF644 | intron_06 | chr1: | chr1: | CAGUUGCAGAAUUCUUCAUU | − |
| | | | | 90941310- | 90947151- | | |
| | | | | 90972743 | 90947170 | | |
| 902 | 84146 | ZNF644 | intron_06 | chr1: | chr1: | GCAGGUAACUGUGUGGAUGA | + |
| | | | | 90941310- | 90947009- | | |
| | | | | 90972743 | 90947028 | | |
| 903 | 84146 | ZNF644 | intron_06 | chr1: | chr1: | CCCAUGUGGUAAACGGAAGC | + |
| | | | | 90941310- | 90946991- | | |
| | | | | 90972743 | 90947010 | | |
| 904 | 84146 | ZNF644 | intron_06 | chr1: | chr1: | AGAAGCUCCCAUGUGGUAAA | + |
| | | | | 90941310- | 90946984- | | |
| | | | | 90972743 | 90947003 | | |
| 905 | 84146 | ZNF644 | intron_06 | chr1: | chr1: | ACCUGCUUCCGUUUACCACA | − |
| | | | | 90941310- | 90946995- | | |
| | | | | 90972743 | 90947014 | | |
| 906 | 84146 | ZNF644 | intron_06 | chr1: | chr1: | CCUGCUUCCGUUUACCACAU | − |
| | | | | 90941310- | 90946994- | | |
| | | | | 90972743 | 90947013 | | |
| 907 | 84146 | ZNF644 | intron_06 | chr1: | chr1: | CAUCUAAAGAAGCUCCCAUG | + |
| | | | | 90941310- | 90946977- | | |
| | | | | 90972743 | 90946996 | | |
| 908 | 84146 | ZNF644 | intron_06 | chr1: | chr1: | GUUAUUAGGUGUUUAUGGUC | − |
| | | | | 90941310- | 90946906- | | |
| | | | | 90972743 | 90946925 | | |
| 909 | 84146 | ZNF644 | intron_06 | chr1: | chr1: | AAGGCAGAUGUUACAAAGUC | + |
| | | | | 90941310- | 90946878- | | |
| | | | | 90972743 | 90946897 | | |
| 910 | 84146 | ZNF644 | intron_06 | chr1: | chr1: | AUCCUCACUUGUUAACAGGA | + |
| | | | | 90941310- | 90946859- | | |
| | | | | 90972743 | 90946878 | | |
| 911 | 84146 | ZNF644 | intron_06 | chr1: | chr1: | UACCAUCCUCACUUGUUAAC | + |
| | | | | 90941310- | 90946855- | | |
| | | | | 90972743 | 90946874 | | |
| 912 | 84146 | ZNF644 | intron_06 | chr1: | chr1: | UGCCUUCCUGUUAACAAGUG | − |
| | | | | 90941310- | 90946864- | | |
| | | | | 90972743 | 90946883 | | |
| 913 | 84146 | ZNF644 | intron_06 | chr1: | chr1: | UAACAAGUGAGGAUGGUACA | − |
| | | | | 90941310- | 90946853- | | |
| | | | | 90972743 | 90946872 | | |
| 914 | 84146 | ZNF644 | intron_06 | chr1: | chr1: | UCAGGAACAAGCUGUUCAAC | − |
| | | | | 90941310- | 90946828- | | |
| | | | | 90972743 | 90946847 | | |
| 915 | 84146 | ZNF644 | intron_06 | chr1: | chr1: | UCAUGAUACAGUUAGCUCUG | − |
| | | | | 90941310- | 90946680- | | |
| | | | | 90972743 | 90946699 | | |
| 916 | 84146 | ZNF644 | intron_06 | chr1: | chr1: | UUAGCUCUGUGGCAGUGUGU | − |
| | | | | 90941310- | 90946669- | | |
| | | | | 90972743 | 90946688 | | |
| 917 | 84146 | ZNF644 | intron_06 | chr1: | chr1: | ACAGAUCAUAAGUUAACUAA | − |
| | | | | 90941310- | 90946603- | | |
| | | | | 90972743 | 90946622 | | |
| 918 | 84146 | ZNF644 | intron_06 | chr1: | chr1: | UUUUAAAGUCAGUCUCAUGC | − |
| | | | | 90941310- | 90946329- | | |
| | | | | 90972743 | 90946348 | | |
| 919 | 84146 | ZNF644 | intron_06 | chr1: | chr1: | AUCCAGGUAAUAACUUAUUC | + |
| | | | | 90941310- | 90946251- | | |
| | | | | 90972743 | 90946270 | | |
| 920 | 84146 | ZNF644 | intron_06 | chr1: | chr1: | AUCCAGAAUAAGUUAUUACC | − |
| | | | | 90941310- | 90946256- | | |
| | | | | 90972743 | 90946275 | | |
| 921 | 84146 | ZNF644 | intron_06 | chr1: | chr1: | GAAGACAGAAUGUAUCAUCC | + |
| | | | | 90941310- | 90946235- | | |
| | | | | 90972743 | 90946254 | | |
| 922 | 84146 | ZNF644 | intron_06 | chr1: | chr1: | GUGUGCACUAGGUGAGAUUU | − |
| | | | | 90941310- | 90946208- | | |
| | | | | 90972743 | 90946227 | | |
| 923 | 84146 | ZNF644 | intron_06 | chr1: | chr1: | ACAUUGUGUAUGGUAUAUAU | − |
| | | | | 90941310- | 90946172- | | |
| | | | | 90972743 | 90946191 | | |
| 924 | 84146 | ZNF644 | intron_06 | chr1: | chr1: | AGUUAGUAAUGUAUGAGAUU | + |
| | | | | 90941310- | 90946051- | | |
| | | | | 90972743 | 90946070 | | |
| 925 | 84146 | ZNF644 | intron_06 | chr1: | chr1: | CAGUUAGUAAUGUAUGAGAU | + |
| | | | | 90941310- | 90946050- | | |
| | | | | 90972743 | 90946069 | | |
| 926 | 84146 | ZNF644 | intron_06 | chr1: | chr1: | GAAGUUGUCAUGUGUUCACA | − |
| | | | | 90941310- | 90946031- | | |
| | | | | 90972743 | 90946050 | | |
| 927 | 84146 | ZNF644 | intron_06 | chr1: | chr1: | AAUUAUAGUUAGGAUCUGUC | + |
| | | | | 90941310- | 90945974- | | |
| | | | | 90972743 | 90945993 | | |
| 928 | 84146 | ZNF644 | intron_06 | chr1: | chr1: | CCACUAGCUGAAUUAUAGUU | + |
| | | | | 90941310- | 90945964- | | |
| | | | | 90972743 | 90945983 | | |
| 929 | 84146 | ZNF644 | intron_06 | chr1: | chr1: | UAAUGAACUAAUAUACAAUG | − |
| | | | | 90941310- | 90945904- | | |
| | | | | 90972743 | 90945923 | | |
| 930 | 84146 | ZNF644 | intron_06 | chr1: | chr1: | AAUUAUUCGUGAACAGAAAG | − |
| | | | | 90941310- | 90945728- | | |
| | | | | 90972743 | 90945747 | | |
| 931 | 84146 | ZNF644 | intron_06 | chr1: | chr1: | UCCCUCUGAGCAAGCUUCCU | + |
| | | | | 90941310- | 90945649- | | |
| | | | | 90972743 | 90945668 | | |
| 932 | 84146 | ZNF644 | intron_06 | chr1: | chr1: | GACCUAGGAAGCUUGCUCAG | − |
| | | | | 90941310- | 90945654- | | |
| | | | | 90972743 | 90945673 | | |
| 933 | 84146 | ZNF644 | intron_06 | chr1: | chr1: | CCUCACUACACUACAUCUUG | + |
| | | | | 90941310- | 90945573- | | |
| | | | | 90972743 | 90945592 | | |
| 934 | 84146 | ZNF644 | intron_06 | chr1: | chr1: | CCUCAAGAUGUAGUGUAGUG | − |
| | | | | 90941310- | 90945576- | | |
| | | | | 90972743 | 90945595 | | |
| 935 | 84146 | ZNF644 | intron_06 | chr1: | chr1: | CUCAAGAUGUAGUGUAGUGA | − |
| | | | | 90941310- | 90945575- | | |
| | | | | 90972743 | 90945594 | | |
| 936 | 84146 | ZNF644 | intron_06 | chr1: | chr1: | GAGACAAUAAGUCUAGCUUG | − |
| | | | | 90941310- | 90945501- | | |
| | | | | 90972743 | 90945520 | | |
| 937 | 84146 | ZNF644 | intron_06 | chr1: | chr1: | GUAGGAACGUAUUUGAAGGU | + |
| | | | | 90941310- | 90945113- | | |
| | | | | 90972743 | 90945132 | | |
| 938 | 84146 | ZNF644 | intron_06 | chr1: | chr1: | AGUAGGAACGUAUUUGAAGG | + |
| | | | | 90941310- | 90945112- | | |
| | | | | 90972743 | 90945131 | | |
| 939 | 84146 | ZNF644 | intron_06 | chr1: | chr1: | CAAAGUAGGAACGUAUUUGA | + |
| | | | | 90941310- | 90945109- | | |
| | | | | 90972743 | 90945128 | | |
| 940 | 84146 | ZNF644 | intron_06 | chr1: | chr1: | UUAGGUUACUAUAACAAAGU | + |
| | | | | 90941310- | 90945095- | | |
| | | | | 90972743 | 90945114 | | |
| 941 | 84146 | ZNF644 | intron_06 | chr1: | chr1: | AGAGACAUCAAUACCAGUUU | + |
| | | | | 90941310- | 90945077- | | |
| | | | | 90972743 | 90945096 | | |
| 942 | 84146 | ZNF644 | intron_06 | chr1: | chr1: | UGAGAUACAAUGCAGAACCA | + |
| | | | | 90941310- | 90944874- | | |
| | | | | 90972743 | 90944893 | | |
| 943 | 84146 | ZNF644 | intron_06 | chr1: | chr1: | ACAAGUAGAUUAACGUUUUG | + |
| | | | | 90941310- | 90944744- | | |
| | | | | 90972743 | 90944763 | | |
| 944 | 84146 | ZNF644 | intron_06 | chr1: | chr1: | GACAGUAUAGAUUUGAUGAC | − |
| | | | | 90941310- | 90944640- | | |
| | | | | 90972743 | 90944659 | | |
| 945 | 84146 | ZNF644 | intron_06 | chr1: | chr1: | CACAUCCACAUAAUAAAAUA | + |
| | | | | 90941310- | 90944475- | | |
| | | | | 90972743 | 90944494 | | |
| 946 | 84146 | ZNF644 | intron_06 | chr1: | chr1: | UCUAUGUUUUUGAACAAAAC | − |
| | | | | 90941310- | 90944341- | | |
| | | | | 90972743 | 90944360 | | |
| 947 | 84146 | ZNF644 | intron_06 | chr1: | chr1: | CUUUAUAAGAGCUUUUCAUA | + |
| | | | | 90941310- | 90944295- | | |
| | | | | 90972743 | 90944314 | | |
| 948 | 84146 | ZNF644 | intron_06 | chr1: | chr1: | AAGCUCUUAUAAAGCCAUUC | − |
| | | | | 90941310- | 90944289- | | |
| | | | | 90972743 | 90944308 | | |
| 949 | 84146 | ZNF644 | intron_06 | chr1: | chr1: | CUGCAUCCUCAUUACCGGAA | + |
| | | | | 90941310- | 90944272- | | |
| | | | | 90972743 | 90944291 | | |
| 950 | 84146 | ZNF644 | intron_06 | chr1: | chr1: | AUAAAGCCAUUCCGGUAAUG | − |
| | | | | 90941310- | 90944281- | | |
| | | | | 90972743 | 90944300 | | |
| 951 | 84146 | ZNF644 | intron_06 | chr1: | chr1: | UUGGUACCCCCUGAACAGCA | + |
| | | | | 90941310- | 90944214- | | |
| | | | | 90972743 | 90944233 | | |
| 952 | 84146 | ZNF644 | intron_06 | chr1: | chr1: | AUUGGUACCCCCUGAACAGC | + |
| | | | | 90941310- | 90944213- | | |
| | | | | 90972743 | 90944232 | | |
| 953 | 84146 | ZNF644 | intron_06 | chr1: | chr1: | AGUUUGUCACCCUGCUGUUC | − |
| | | | | 90941310- | 90944226- | | |
| | | | | 90972743 | 90944245 | | |
| 954 | 84146 | ZNF644 | intron_06 | chr1: | chr1: | GUUUGUCACCCUGCUGUUCA | − |
| | | | | 90941310- | 90944225- | | |
| | | | | 90972743 | 90944244 | | |
| 955 | 84146 | ZNF644 | intron_06 | chr1: | chr1: | UUUGUCACCCUGCUGUUCAG | − |
| | | | | 90941310- | 90944224- | | |
| | | | | 90972743 | 90944243 | | |
| 956 | 84146 | ZNF644 | intron_06 | chr1: | chr1: | UUGUCACCCUGCUGUUCAGG | − |
| | | | | 90941310- | 90944223- | | |
| | | | | 90972743 | 90944242 | | |
| 957 | 84146 | ZNF644 | intron_06 | chr1: | chr1: | CCCAUUUAAAGCAACUUCAU | + |
| | | | | 90941310- | 90944195- | | |
| | | | | 90972743 | 90944214 | | |
| 958 | 84146 | ZNF644 | intron_06 | chr1: | chr1: | CCAAUGAAGUUGCUUUAAAU | − |
| | | | | 90941310- | 90944198- | | |
| | | | | 90972743 | 90944217 | | |
| 959 | 84146 | ZNF644 | intron_06 | chr1: | chr1: | ACCUCUAACACCAGAACAGA | − |
| | | | | 90941310- | 90944154- | | |
| | | | | 90972743 | 90944173 | | |
| 960 | 84146 | ZNF644 | intron_06 | chr1: | chr1: | GGUGGAACAUAGAACAUGGA | − |
| | | | | 90941310- | 90944132- | | |
| | | | | 90972743 | 90944151 | | |
| 961 | 84146 | ZNF644 | intron_06 | chr1: | chr1: | CAUGGAAGGUUUUACCUCUG | − |
| | | | | 90941310- | 90944118- | | |
| | | | | 90972743 | 90944137 | | |
| 962 | 84146 | ZNF644 | intron_06 | chr1: | chr1: | CUUCACUGUUACCACCUCAG | + |
| | | | | 90941310- | 90944101- | | |
| | | | | 90972743 | 90944120 | | |
| 963 | 84146 | ZNF644 | intron_06 | chr1: | chr1: | CCCACUUAUUAUAAUCACAG | + |
| | | | | 90941310- | 90943978- | | |
| | | | | 90972743 | 90943997 | | |
| 964 | 84146 | ZNF644 | intron_06 | chr1: | chr1: | ACCUCUGUGAUUAUAAUAAG | − |
| | | | | 90941310- | 90943982- | | |
| | | | | 90972743 | 90944001 | | |
| 965 | 84146 | ZNF644 | intron_06 | chr1: | chr1: | CCUCUGUGAUUAUAAUAAGU | − |
| | | | | 90941310- | 90943981- | | |
| | | | | 90972743 | 90944000 | | |
| 966 | 84146 | ZNF644 | intron_06 | chr1: | chr1: | UGAAUGGUAGUGUAGCAUUA | − |
| | | | | 90941310- | 90943838- | | |
| | | | | 90972743 | 90943857 | | |
| 967 | 84146 | ZNF644 | intron_06 | chr1: | chr1: | GAAAGGGUGUGCAAAUGUCA | + |
| | | | | 90941310- | 90943798- | | |
| | | | | 90972743 | 90943817 | | |
| 968 | 84146 | ZNF644 | intron_06 | chr1: | chr1: | GCAGCACAUAAACAUGUGUU | + |
| | | | | 90941310- | 90943776- | | |
| | | | | 90972743 | 90943795 | | |
| 969 | 84146 | ZNF644 | intron_06 | chr1: | chr1: | UGUGAUGUAGAGACUCCUGC | − |
| | | | | 90941310- | 90943736- | | |
| | | | | 90972743 | 90943755 | | |
| 970 | 84146 | ZNF644 | intron_06 | chr1: | chr1: | GUGAUGUAGAGACUCCUGCU | − |
| | | | | 90941310- | 90943735- | | |
| | | | | 90972743 | 90943754 | | |
| 971 | 84146 | ZNF644 | intron_06 | chr1: | chr1: | GUGCUAAUGCAUCACCCAGC | + |
| | | | | 90941310- | 90943718- | | |
| | | | | 90972743 | 90943737 | | |
| 972 | 84146 | ZNF644 | intron_06 | chr1: | chr1: | UUAAUGAUAUCACUCCAAAA | + |
| | | | | 90941310- | 90943696- | | |
| | | | | 90972743 | 90943715 | | |
| 973 | 84146 | ZNF644 | intron_06 | chr1: | chr1: | ACAGAAUUCUAAAACCUACG | − |
| | | | | 90941310- | 90943621- | | |
| | | | | 90972743 | 90943640 | | |
| 974 | 84146 | ZNF644 | intron_06 | chr1: | chr1: | CAGAAUUCUAAAACCUACGA | − |
| | | | | 90941310- | 90943620- | | |
| | | | | 90972743 | 90943639 | | |
| 975 | 84146 | ZNF644 | intron_06 | chr1: | chr1: | UCAUUUUUUCCACCCCUCGU | + |
| | | | | 90941310- | 90943604- | | |
| | | | | 90972743 | 90943623 | | |
| 976 | 84146 | ZNF644 | intron_06 | chr1: | chr1: | AUUCUAAAACCUACGAGGGG | − |
| | | | | 90941310- | 90943616- | | |
| | | | | 90972743 | 90943635 | | |
| 977 | 84146 | ZNF644 | intron_06 | chr1: | chr1: | GGGGUGGAAAAAAUGAUUGU | − |
| | | | | 90941310- | 90943600- | | |
| | | | | 90972743 | 90943619 | | |
| 978 | 84146 | ZNF644 | intron_06 | chr1: | chr1: | AUGUCAAAGAUACUGGUAAU | − |
| | | | | 90941310- | 90943566- | | |
| | | | | 90972743 | 90943585 | | |
| 979 | 84146 | ZNF644 | intron_06 | chr1: | chr1: | AUAUUUCUACUAUCCUUUAA | + |
| | | | | 90941310- | 90943077- | | |
| | | | | 90972743 | 90943096 | | |
| 980 | 84146 | ZNF644 | intron_06 | chr1: | chr1: | AAUAUUUCUACUAUCCUUUA | + |
| | | | | 90941310- | 90943076- | | |
| | | | | 90972743 | 90943095 | | |
| 981 | 84146 | ZNF644 | intron_06 | chr1: | chr1: | AAUGGUAAACAAGACAAGUU | + |
| | | | | 90941310- | 90942913- | | |
| | | | | 90972743 | 90942932 | | |
| 982 | 84146 | ZNF644 | intron_06 | chr1: | chr1: | UACUUCAAUUAGUUAAUACC | − |
| | | | | 90941310- | 90942789- | | |
| | | | | 90972743 | 90942808 | | |
| 983 | 84146 | ZNF644 | intron_06 | chr1: | chr1: | CUUCAAUUAGUUAAUACCUG | − |
| | | | | 90941310- | 90942787- | | |
| | | | | 90972743 | 90942806 | | |
| 984 | 84146 | ZNF644 | intron_06 | chr1: | chr1: | AAUUUAAAGAACCUGCUAUU | + |
| | | | | 90941310- | 90942758- | | |
| | | | | 90972743 | 90942777 | | |
| 985 | 84146 | ZNF644 | intron_06 | chr1: | chr1: | AUUCAAACACAAGUUCCAUC | + |
| | | | | 90941310- | 90942672- | | |
| | | | | 90972743 | 90942691 | | |
| 986 | 84146 | ZNF644 | intron_06 | chr1: | chr1: | UGCAAGGGAACUUUUCAUAG | − |
| | | | | 90941310- | 90942378- | | |
| | | | | 90972743 | 90942397 | | |
| 987 | 84146 | ZNF644 | intron_06 | chr1: | chr1: | GCAAGGGAACUUUUCAUAGU | − |
| | | | | 90941310- | 90942377- | | |
| | | | | 90972743 | 90942396 | | |
| 988 | 84146 | ZNF644 | intron_06 | chr1: | chr1: | GGGGGUAGGCAUUACAGUCA | − |
| | | | | 90941310- | 90942357- | | |
| | | | | 90972743 | 90942376 | | |
| 989 | 84146 | ZNF644 | intron_06 | chr1: | chr1: | CAUUACAGUCAUGGUGUGAA | − |
| | | | | 90941310- | 90942348- | | |
| | | | | 90972743 | 90942367 | | |
| 990 | 84146 | ZNF644 | intron_06 | chr1: | chr1: | GAUCUGGUGGUCUAGUGCAA | + |
| | | | | 90941310- | 90942160- | | |
| | | | | 90972743 | 90942179 | | |
| 991 | 84146 | ZNF644 | intron_06 | chr1: | chr1: | UUAUCCCACUUAUGAUCUGG | + |
| | | | | 90941310- | 90942147- | | |
| | | | | 90972743 | 90942166 | | |
| 992 | 84146 | ZNF644 | intron_06 | chr1: | chr1: | CAGUUAUCCCACUUAUGAUC | + |
| | | | | 90941310- | 90942144- | | |
| | | | | 90972743 | 90942163 | | |
| 993 | 84146 | ZNF644 | intron_06 | chr1: | chr1: | UAGACCACCAGAUCAUAAGU | − |
| | | | | 90941310- | 90942154- | | |
| | | | | 90972743 | 90942173 | | |
| 994 | 84146 | ZNF644 | intron_06 | chr1: | chr1: | UAGAGAAUGCCUAGAAUUUG | − |
| | | | | 90941310- | 90942120- | | |
| | | | | 90972743 | 90942139 | | |
| 995 | 84146 | ZNF644 | intron_06 | chr1: | chr1: | AGUUAAGGUUAAUUUGAAUA | − |
| | | | | 90941310- | 90941993- | | |
| | | | | 90972743 | 90942012 | | |
| 996 | 84146 | ZNF644 | intron_06 | chr1: | chr1: | CACUUAAGUAGGUUUAUCAG | + |
| | | | | 90941310- | 90941707- | | |
| | | | | 90972743 | 90941726 | | |
| 997 | 84146 | ZNF644 | intron_06 | chr1: | chr1: | GUAUUAGCAAUCUCCACGUG | − |
| | | | | 90941310- | 90941673- | | |
| | | | | 90972743 | 90941692 | | |
| 998 | 84146 | ZNF644 | intron_06 | chr1: | chr1: | AUUUUGUAUACAUGACGUAU | − |
| | | | | 90941310- | 90941532- | | |
| | | | | 90972743 | 90941551 | | |
| 999 | 84146 | ZNF644 | intron_06 | chr1: | chr1: | AAGAACAAUAUUAACCUUUG | − |
| | | | | 90941310- | 90941487- | | |
| | | | | 90972743 | 90941506 | | |
| 1000 | 84146 | ZNF644 | exon_07_c.1/ | chr1: | chr1: | CUAGACUAAAUGUGUUAAAU | − |
| | | | nc.1 | 90940949- | 90941294- | | |
| | | | | 90941309 | 90941313 | | |
| 1001 | 84146 | ZNF644 | exon_07_c.1/ | chr1: | chr1: | CUUCAAAUCAUCCAUAUUGU | + |
| | | | nc.1 | 90940949- | 90941264- | | |
| | | | | 90941309 | 90941283 | | |
| 1002 | 84146 | ZNF644 | exon_07_c.1/ | chr1: | chr1: | UUCUUUAGCACCAGUAAUAU | + |
| | | | nc.1 | 90940949- | 90941234- | | |
| | | | | 90941309 | 90941253 | | |
| 1003 | 84146 | ZNF644 | exon_07_c.1/ | chr1: | chr1: | AAGAUAAACACCGAUAUUAC | − |
| | | | nc.1 | 90940949- | 90941247- | | |
| | | | | 90941309 | 90941266 | | |
| 1004 | 84146 | ZNF644 | exon_07_c.1/ | chr1: | chr1: | UUGUCCUUUGACAGUUCUUC | + |
| | | | nc.1 | 90940949- | 90941109- | | |
| | | | | 90941309 | 90941128 | | |
| 1005 | 84146 | ZNF644 | exon_07_c.1/ | chr1: | chr1: | UCUGAAAACGCCUUAAGUGG | − |
| | | | nc.1 | 90940949- | 90941088- | | |
| | | | | 90941309 | 90941107 | | |
| 1006 | 84146 | ZNF644 | exon_07_c.1/ | chr1: | chr1: | UCUAGUCUAUUUAUACAUGC | − |
| | | | nc.1 | 90940949- | 90941061- | | |
| | | | | 90941309 | 90941080 | | |
| 1007 | 84146 | ZNF644 | exon_07_c.1/ | chr1: | chr1: | GAAAACUUUAUCUUGCCUAA | − |
| | | | nc.1 | 90940949- | 90941019- | | |
| | | | | 90941309 | 90941038 | | |
| 1008 | 84146 | ZNF644 | exon_07_c.1/ | chr1: | chr1: | AUUGGAAGUCUUAGUUAAGG | + |
| | | | nc.1 | 90940949- | 90940964- | | |
| | | | | 90941309 | 90940983 | | |
| 1009 | 84146 | ZNF644 | exon_07_c.1/ | chr1: | chr1: | AACACUGCCUUUAUUCAUAU | + |
| | | | nc.1 | 90940949- | 90940946- | | |
| | | | | 90941309 | 90940965 | | |
| 1010 | 84146 | ZNF644 | exon_07_c.1/ | chr1: | chr1: | GGCAGUGUUUCAUUAACCAC | − |
| | | | | 90940121- | 90940935- | | |
| | | | | 90940948 | 90940954 | | |
| 1011 | 84146 | ZNF644 | exon_07_c.1/ | chr1: | chr1: | AUUAACCACUGGACAGCCUG | − |
| | | | | 90940121- | 90940924- | | |
| | | | | 90940948 | 90940943 | | |
| 1012 | 84146 | ZNF644 | exon_07_c.1/ | chr1: | chr1: | UCUGUUGUUGGCUGAUCCAC | + |
| | | | | 90940121- | 90940905- | | |
| | | | | 90940948 | 90940924 | | |
| 1013 | 84146 | ZNF644 | exon_07_c.1/ | chr1: | chr1: | AGUUUUUUAUUGGAAUGGGU | + |
| | | | | 90940121- | 90940773- | | |
| | | | | 90940948 | 90940792 | | |
| 1014 | 84146 | ZNF644 | exon_07_c.1/ | chr1: | chr1: | UAGUUUUUUAUUGGAAUGGG | + |
| | | | | 90940121- | 90940772- | | |
| | | | | 90940948 | 90940791 | | |
| 1015 | 84146 | ZNF644 | exon_07_c.1/ | chr1: | chr1: | AGAGGUAGGUAGUUUUUUAU | + |
| | | | | 90940121- | 90940763- | | |
| | | | | 90940948 | 90940782 | | |
| 1016 | 84146 | ZNF644 | exon_07_c.1/ | chr1: | chr1: | GUCACAACCAACUGAAGCAG | + |
| | | | | 90940121- | 90940745- | | |
| | | | | 90940948 | 90940764 | | |
| 1017 | 84146 | ZNF644 | exon_07_c.1/ | chr1: | chr1: | UUUAAUAAAUCAAGUAGAGG | − |
| | | | | 90940121- | 90940684- | | |
| | | | | 90940948 | 90940703 | | |
| 1018 | 84146 | ZNF644 | exon_07_c.1/ | chr1: | chr1: | UUAAUAAAUCAAGUAGAGGU | − |
| | | | | 90940121- | 90940683- | | |
| | | | | 90940948 | 90940702 | | |
| 1019 | 84146 | ZNF644 | exon_07_c.1/ | chr1: | chr1: | GAUUGUGUCAAUACAGUAAC | − |
| | | | | 90940121- | 90940629- | | |
| | | | | 90940948 | 90940648 | | |
| 1020 | 84146 | ZNF644 | exon_07_c.1/ | chr1: | chr1: | CCUAAAUCCAUCUGUACCUG | + |
| | | | | 90940121- | 90940598- | | |
| | | | | 90940948 | 90940617 | | |
| 1021 | 84146 | ZNF644 | exon_07_c.1/ | chr1: | chr1: | UCAAUUUCUUAUGACUAAUG | − |
| | | | | 90940121- | 90940537- | | |
| | | | | 90940948 | 90940556 | | |
| 1022 | 84146 | ZNF644 | exon_07_c.1/ | chr1: | chr1: | UCUAGACCUAUUUUAGAAUG | + |
| | | | | 90940121- | 90940491- | | |
| | | | | 90940948 | 90940510 | | |
| 1023 | 84146 | ZNF644 | exon_07_c.1/ | chr1: | chr1: | GCUCCACCUCAUUCUAAAAU | − |
| | | | | 90940121- | 90940500- | | |
| | | | | 90940948 | 90940519 | | |
| 1024 | 84146 | ZNF644 | exon_07_c.1/ | chr1: | chr1: | CAAGAUAACUCGUUAUACCG | − |
| | | | | 90940121- | 90940441- | | |
| | | | | 90940948 | 90940460 | | |
| 1025 | 84146 | ZNF644 | exon_07_c.1/ | chr1: | chr1: | GUUAUAAAUUAGAUGUUGGA | + |
| | | | | 90940121- | 90940256- | | |
| | | | | 90940948 | 90940275 | | |
| 1026 | 84146 | ZNF644 | exon_07_c.1/ | chr1: | chr1: | UCUCUUCUCCACACUUAUCU | + |
| | | | | 90940121- | 90940234- | | |
| | | | | 90940948 | 90940253 | | |
| 1027 | 84146 | ZNF644 | exon_07_c.1/ | chr1: | chr1: | CUCUCUUCUCCACACUUAUC | + |
| | | | | 90940121- | 90940233- | | |
| | | | | 90940948 | 90940252 | | |
| 1028 | 84146 | ZNF644 | exon_07_c.1/ | chr1: | chr1: | UCUUCGGUACUGAAAGUAGC | + |
| | | | | 90940121- | 90940137- | | |
| | | | | 90940948 | 90940156 | | |
| 1029 | 84146 | ZNF644 | exon_07_c.1/ | chr1: | chr1: | UUUGUACAGGGGUAGAAUGA | + |
| | | | | 90940121- | 90940113- | | |
| | | | | 90940948 | 90940132 | | |
| 1030 | 84146 | ZNF644 | exon_07_c.1/ | chr1: | chr1: | AUUCACAUUGCACUUUGUAC | + |
| | | | nc.2 | 90940070- | 90940100- | | |
| | | | | 90940120 | 90940119 | | |
| 1031 | 84146 | ZNF644 | exon_07_c.1/ | chr1: | chr1: | CAAAGUGCAAUGUGAAUUUU | − |
| | | | nc.2 | 90940070- | 90940097- | | |
| | | | | 90940120 | 90940116 | | |
| 1032 | 84146 | ZNF644 | exon_07_c.1/ | chr1: | chr1: | AAUGAUACAUCAUAUGCCUG | + |
| | | | nc.2 | 90940070- | 90940057- | | |
| | | | | 90940120 | 90940076 | | |
| 1033 | 84146 | ZNF644 | exon_07_c.2/ | chr1: | chr1: | CAUAUGAUGUAUCAUUUAGA | − |
| | | | | 90938272- | 90940053- | | |
| | | | | 90940069 | 90940072 | | |
| 1034 | 84146 | ZNF644 | exon_07_c.2/ | chr1: | chr1: | AUGGCCUUGGGACAUUAAGA | + |
| | | | | 90938272- | 90940012- | | |
| | | | | 90940069 | 90940031 | | |
| 1035 | 84146 | ZNF644 | exon _07_c.2/ | chr1: | chr1: | UUCGCCAUCUUAAUGUCCCA | − |
| | | | | 90938272- | 90940019- | | |
| | | | | 90940069 | 90940038 | | |
| 1036 | 84146 | ZNF644 | exon_07_c.2/ | chr1: | chr1: | UCUCUACAAGCAUAUGGCCU | + |
| | | | | 90938272- | 90939999- | | |
| | | | | 90940069 | 90940018 | | |
| 1037 | 84146 | ZNF644 | exon_07_c.2/ | chr1: | chr1: | UCGUGAAUUGAAAGAACUUC | − |
| | | | | 90938272- | 90939892- | | |
| | | | | 90940069 | 90939911 | | |
| 1038 | 84146 | ZNF644 | exon_07_c.2/ | chr1: | chr1: | CCCCAUGUGCAAUGCCUCGA | + |
| | | | | 90938272- | 90939706- | | |
| | | | | 90940069 | 90939725 | | |
| 1039 | 84146 | ZNF644 | exo 07_c.2/ | chr1: | chr1: | GCCAUCGAGGCAUUGCACAU | − |
| | | | | 90938272- | 90939710- | | |
| | | | | 90940069 | 90939729 | | |
| 1040 | 84146 | ZNF644 | exon_07_c.2/ | chr1: | chr1: | CCAUCGAGGCAUUGCACAUG | − |
| | | | | 90938272- | 90939709- | | |
| | | | | 90940069 | 90939728 | | |
| 1041 | 84146 | ZNF644 | exon_07_c.2/ | chr1: | chr1: | AGGCAUUGCACAUGGGGCAG | − |
| | | | | 90938272- | 90939703- | | |
| | | | | 90940069 | 90939722 | | |
| 1042 | 84146 | ZNF644 | exon_07_c.2/ | chr1: | chr1: | GGCAGUGGUAAAAUGCCCUA | − |
| | | | | 90938272- | 90939688- | | |
| | | | | 90940069 | 90939707 | | |
| 1043 | 84146 | ZNF644 | exon_07_c.2/ | chr1: | chr1: | GCAAUAUCAGAAGUGACCAU | + |
| | | | | 90938272- | 90939669- | | |
| | | | | 90940069 | 90939688 | | |
| 1044 | 84146 | ZNF644 | exon_07_c.2/ | chr1: | chr1: | CUUUUGGCUGAAGUAGUAAA | + |
| | | | | 90938272- | 90939558- | | |
| | | | | 90940069 | 90939577 | | |
| 1045 | 84146 | ZNF644 | exon_07_c.2/ | chr1: | chr1: | CACUAUCUACAGGUUCUUCA | + |
| | | | | 90938272- | 90939442- | | |
| | | | | 90940069 | 90939461 | | |
| 1046 | 84146 | ZNF644 | exon_07_c.2/ | chr1: | chr1: | UUAGUGCUAUCACUAUCUAC | + |
| | | | | 90938272- | 90939432- | | |
| | | | | 90940069 | 90939451 | | |
| 1047 | 84146 | ZNF644 | exon_07_c.2/ | chr1: | chr1: | CGAGCUUUCUGUAUUCUGUG | + |
| | | | | 90938272- | 90939291- | | |
| | | | | 90940069 | 90939310 | | |
| 1048 | 84146 | ZNF644 | exon_07_c.2/ | chr1: | chr1: | CACACAGAAUACAGAAAGCU | − |
| | | | | 90938272- | 90939293- | | |
| | | | | 90940069 | 90939312 | | |
| 1049 | 84146 | ZNF644 | exon_07_c.2/ | chr1: | chr1: | CGGAAAAGCAUUGCCCAAUC | − |
| | | | | 90938272- | 90939273- | | |
| | | | | 90940069 | 90939292 | | |
| 1050 | 84146 | ZNF644 | exon_07_c.2/ | chr1: | chr1: | GCACAUGUUUACACCUGAUU | + |
| | | | | 90938272- | 90939257- | | |
| | | | | 90940069 | 90939276 | | |
| 1051 | 84146 | ZNF644 | exon_07_c.2/ | chr1: | chr1: | UGCACAUGUUUACACCUGAU | + |
| | | | | 90938272- | 90939256- | | |
| | | | | 90940069 | 90939275 | | |
| 1052 | 84146 | ZNF644 | exon_07_c.2/ | chr1: | chr1: | GAUGGAAAUACUUAGGUUUU | + |
| | | | | 90938272- | 90939184- | | |
| | | | | 90940069 | 90939203 | | |
| 1053 | 84146 | ZNF644 | exon_07_c.2/ | chr1: | chr1: | CUUUUGGCGUCAGGCUUAUG | + |
| | | | | 90938272- | 90938967- | | |
| | | | | 90940069 | 90938986 | | |
| 1054 | 84146 | ZNF644 | exon_07_c.2/ | chr1: | chr1: | CUUUCAGGCCUUUUGGCGUC | + |
| | | | | 90938272- | 90938958- | | |
| | | | | 90940069 | 90938977 | | |
| 1055 | 84146 | ZNF644 | exon_07_c.2/ | chr1: | chr1: | CUCAUAAGCCUGACGCCAAA | − |
| | | | | 90938272- | 90938969- | | |
| | | | | 90940069 | 90938988 | | |
| 1056 | 84146 | ZNF644 | exon_07_c.2/ | chr1: | chr1: | AGUAAUUAAGGAAUCUAAGA | − |
| | | | | 90938272- | 90938905- | | |
| | | | | 90940069 | 90938924 | | |
| 1057 | 84146 | ZNF644 | exon_07_c.2/ | chr1: | chr1: | UCUAAGAAGGAAAGUUCUGU | − |
| | | | | 90938272- | 90938892- | | |
| | | | | 90940069 | 90938911 | | |
| 1058 | 84146 | ZNF644 | exon_07_c.2/ | chr1: | chr1: | AAGAAGGAAAGUUCUGUUGG | − |
| | | | | 90938272- | 90938889- | | |
| | | | | 90940069 | 90938908 | | |
| 1059 | 84146 | ZNF644 | exon_07_c.2/ | chr1: | chr1: | UCCUGGGAUAAUGUUGAGUU | − |
| | | | | 90938272- | 90938757- | | |
| | | | | 90940069 | 90938776 | | |
| 1060 | 84146 | ZNF644 | exon_07_c.2/ | chr1: | chr1: | GUUAGGAGACUACACUACAC | − |
| | | | | 90938272- | 90938740- | | |
| | | | | 90940069 | 90938759 | | |
| 1061 | 84146 | ZNF644 | exon_07_c.2/ | chr1: | chr1: | UUAUUUAAGAGCAAAGUGGA | − |
| | | | | 90938272- | 90938661- | | |
| | | | | 90940069 | 90938680 | | |
| 1062 | 84146 | ZNF644 | exon_07_c.2/ | chr1: | chr1: | CUUAGUUAUGACCAAAACGA | − |
| | | | | 90938272- | 90938613- | | |
| | | | | 90940069 | 90938632 | | |
| 1063 | 84146 | ZNF644 | exon_07_c.2/ | chr1: | chr1: | UUUGAAUACUAUGAAGAUAC | − |
| | | | | 90938272- | 90938583- | | |
| | | | | 90940069 | 90938602 | | |
| 1064 | 84146 | ZNF644 | exon_07_c.2/ | chr1: | chr1: | UCUGCAGUUUCUAAAUGCUG | + |
| | | | | 90938272- | 90938526- | | |
| | | | | 90940069 | 90938545 | | |
| 1065 | 84146 | ZNF644 | exon_07_c.2/ | chr1: | chr1: | CACCUGUUUCAAAUGUUGCU | + |
| | | | | 90938272- | 90938428- | | |
| | | | | 90940069 | 90938447 | | |
| 1066 | 84146 | ZNF644 | exon_07_c.2/ | chr1: | chr1: | UGCCCAGCAACAUUUGAAAC | − |
| | | | | 90938272- | 90938433- | | |
| | | | | 90940069 | 90938452 | | |
| 1067 | 84146 | ZNF644 | exon_07_c.2/ | chr1: | chr1: | GCAACAUUUGAAACAGGUGU | − |
| | | | | 90938272- | 90938427- | | |
| | | | | 90940069 | 90938446 | | |
| 1068 | 84146 | ZNF644 | exon_07_c.2/ | chr1: | chr1: | UUGGGUUAUCAAAUCAUGUC | − |
| | | | | 90938272- | 90938408- | | |
| | | | | 90940069 | 90938427 | | |
| 1069 | 84146 | ZNF644 | exon_07_c.2/ | chr1: | chr1: | UGGGUUAUCAAAUCAUGUCA | − |
| | | | | 90938272- | 90938407- | | |
| | | | | 90940069 | 90938426 | | |
| 1070 | 84146 | ZNF644 | exon_07_c.2/ | chr1: | chr1: | GGUUAUCAAAUCAUGUCAGG | − |
| | | | | 90938272- | 90938405- | | |
| | | | | 90940069 | 90938424 | | |
| 1071 | 84146 | ZNF644 | exon_07_c.2/ | chr1: | chr1: | UUCUGGUGAUACAACAUGAC | + |
| | | | | 90938272- | 90938348- | | |
| | | | | 90940069 | 90938367 | | |
| 1072 | 84146 | ZNF644 | exon_07_c.2/ | chr1: | chr1: | UCACUUGUGGCUAUUUGUUC | + |
| | | | | 90938272- | 90938331- | | |
| | | | | 90940069 | 90938350 | | |
| 1073 | 84146 | ZNF644 | exon_07_c.2/ | chr1: | chr1: | CCUUUUCUAACUCGUUUAAC | + |
| | | | | 90938272- | 90938271- | | |
| | | | | 90940069 | 90938290 | | |
| 1074 | 84146 | ZNF644 | exon_07_c.2/ | chr1: | chr1: | CCUGUUAAACGAGUUAGAAA | − |
| | | | | 90938272- | 90938274- | | |
| | | | | 90940069 | 90938293 | | |
| 1075 | 84146 | ZNF644 | intron_07 | chr1: | chr1: | UAGAAAAGGUAAGUUCUCCA | − |
| | | | | 90938091- | 90938260- | | |
| | | | | 90938271 | 90938279 | | |
| 1076 | 84146 | ZNF644 | intron_07 | chr1: | chr1: | AGAAAAGGUAAGUUCUCCAU | − |
| | | | | 90938091- | 90938259- | | |
| | | | | 90938271 | 90938278 | | |
| 1077 | 84146 | ZNF644 | exon_08_c | chr1: | chr1: | CUGACAAGUGUGUUCAGAAG | + |
| | | | | 90937939- | 90938050- | | |
| | | | | 90938090 | 90938069 | | |
| 1078 | 84146 | ZNF644 | exon_08_c | chr1: | chr1: | GAACACACUUGUCAGCUCUG | − |
| | | | | 90937939- | 90938045- | | |
| | | | | 90938090 | 90938064 | | |
| 1079 | 84146 | ZNF644 | exon_08_c | chr1: | chr1: | GGUUGGUUUGAUACUAAAAU | − |
| | | | | 90937939- | 90938021- | | |
| | | | | 90938090 | 90938040 | | |
| 1080 | 84146 | ZNF644 | exon_08_c | chr1: | chr1: | AAAGACUUGGAAAGACGAAA | − |
| | | | | 90937939- | 90937969- | | |
| | | | | 90938090 | 90937988 | | |
| 1081 | 84146 | ZNF644 | exon_08_c | chr1: | chr1: | AAGACUUGGAAAGACGAAAU | − |
| | | | | 90937939- | 90937968- | | |
| | | | | 90938090 | 90937987 | | |
| 1082 | 84146 | ZNF644 | exon_08_c | chr1: | chr1: | AUCUCAUUCAGAACACAGAU | + |
| | | | | 90937939- | 90937928- | | |
| | | | | 90938090 | 90937947 | | |
| 1083 | 84146 | ZNF644 | exon_08_c | chr1: | chr1: | UUUUUGAGCUACAAAUGGUC | + |
| | | | | 90937485- | 90937843- | | |
| | | | | 90937882 | 90937862 | | |
| 1084 | 84146 | ZNF644 | exon_08_c | chr1: | chr1: | CCAUUACGGUAUGCUUCAAG | + |
| | | | | 90937485- | 90937781- | | |
| | | | | 90937882 | 90937800 | | |
| 1085 | 84146 | ZNF644 | exon_08_c | chr1: | chr1: | CCUCUUGAAGCAUACCGUAA | − |
| | | | | 90937485- | 90937784- | | |
| | | | | 90937882 | 90937803 | | |
| 1086 | 84146 | ZNF644 | exon_08_c | chr1: | chr1: | CUUCAGUCUUUAGGCCAUUA | + |
| | | | | 90937485- | 90937767- | | |
| | | | | 90937882 | 90937786 | | |
| 1087 | 84146 | ZNF644 | exon_08_c | chr1: | chr1: | GACUGAUUCUUUUUCCCACU | + |
| | | | | 90937485- | 90937670- | | |
| | | | | 90937882 | 90937689 | | |
| 1088 | 84146 | ZNF644 | exon_08_c | chr1: | chr1: | GUCUGAUUAUGGAUCUUUUG | + |
| | | | | 90937485- | 90937583- | | |
| | | | | 90937882 | 90937602 | | |
| 1089 | 84146 | ZNF644 | exon_08_c | chr1: | chr1: | AACGGACUAUCCUCAUUUAA | + |
| | | | | 90937485- | 90937526- | | |
| | | | | 90937882 | 90937545 | | |
| 1090 | 84146 | ZNF644 | exon_08_c | chr1: | chr1: | UUUUGUGGCUGAUACAUCAA | + |
| | | | | 90937485- | 90937508- | | |
| | | | | 90937882 | 90937527 | | |
| 1091 | 84146 | ZNF644 | intron_08 | chr1: | chr1: | UUCAAUUAUGCCUUCUUUAA | − |
| | | | | 90935529- | 90937421- | | |
| | | | | 90937484 | 90937440 | | |
| 1092 | 84146 | ZNF644 | intron_08 | chr1: | chr1: | CUUCUUUAAUGGAAUCUAUG | − |
| | | | | 90935529- | 90937410- | | |
| | | | | 90937484 | 90937429 | | |
| 1093 | 84146 | ZNF644 | intron_08 | chr1: | chr1: | UACAUUCAGACCAAGAAAAG | + |
| | | | | 90935529- | 90937259- | | |
| | | | | 90937484 | 90937278 | | |
| 1094 | 84146 | ZNF644 | intron_08 | chr1: | chr1: | CUUUUCUUGGUCUGAAUGUA | − |
| | | | | 90935529- | 90937259- | | |
| | | | | 90937484 | 90937278 | | |
| 1095 | 84146 | ZNF644 | intron_08 | chr1: | chr1: | GGAGGAUGGUUGUGGAUGGG | − |
| | | | | 90935529- | 90937147- | | |
| | | | | 90937484 | 90937166 | | |
| 1096 | 84146 | ZNF644 | intron_08 | chr1: | chr1: | AACUGGCAAAAAUAUGACAG | + |
| | | | | 90935529- | 90937084- | | |
| | | | | 90937484 | 90937103 | | |
| 1097 | 84146 | ZNF644 | intron_08 | chr1: | chr1: | ACUCUUAAAGCUGAAUGGAU | − |
| | | | | 90935529- | 90936997- | | |
| | | | | 90937484 | 90937016 | | |
| 1098 | 84146 | ZNF644 | intron_08 | chr1: | chr1: | UGGAGAGGGAGAUGUUUCUU | + |
| | | | | 90935529- | 90936954- | | |
| | | | | 90937484 | 90936973 | | |
| 1099 | 84146 | ZNF644 | intron_08 | chr1: | chr1: | UCCGCAAUACAAUGAGGAAU | + |
| | | | | 90935529- | 90936934- | | |
| | | | | 90937484 | 90936953 | | |
| 1100 | 84146 | ZNF644 | intron_08 | chr1: | chr1: | AACUAUUCCGCAAUACAAUG | + |
| | | | | 90935529- | 90936928- | | |
| | | | | 90937484 | 90936947 | | |
| 1101 | 84146 | ZNF644 | intron_08 | chr1: | chr1: | UCCAAUUCCUCAUUGUAUUG | − |
| | | | | 90935529- | 90936938- | | |
| | | | | 90937484 | 90936957 | | |
| 1102 | 84146 | ZNF644 | intron_08 | chr1: | chr1: | CAUUGUAUUGCGGAAUAGUU | − |
| | | | | 90935529- | 90936928- | | |
| | | | | 90937484 | 90936947 | | |
| 1103 | 84146 | ZNF644 | intron_08 | chr1: | chr1: | AUUGCGGAAUAGUUUGGUUU | − |
| | | | | 90935529- | 90936922- | | |
| | | | | 90937484 | 90936941 | | |
| 1104 | 84146 | ZNF644 | intron_08 | chr1: | chr1: | GUUUUAAGAUAGUGCUCUAA | − |
| | | | | 90935529- | 90936857- | | |
| | | | | 90937484 | 90936876 | | |
| 1105 | 84146 | ZNF644 | intron_08 | chr1: | chr1: | CAGAUGAUUUAGCUUAGUGC | − |
| | | | | 90935529- | 90936827- | | |
| | | | | 90937484 | 90936846 | | |
| 1106 | 84146 | ZNF644 | intron_08 | chr1: | chr1: | GUAUGUAUUGGCAAAUAAUG | |
| | | | | 90935529- | 90936767- | | |
| | | | | 90937484 | 90936786 | | |
| 1107 | 84146 | ZNF644 | intron_08 | chr1: | chr1: | UGGCAAUACUGAAUAAAGUU | + |
| | | | | 90935529- | 90936729- | | |
| | | | | 90937484 | 90936748 | | |
| 1108 | 84146 | ZNF644 | intron_08 | chr1: | chr1: | CUAAAAGUAUAAACCACACU | + |
| | | | | 90935529- | 90936709- | | |
| | | | | 90937484 | 90936728 | | |
| 1109 | 84146 | ZNF644 | intron_08 | chr1: | chr1: | AUGUUGAAGGUUUAUGUAAA | − |
| | | | | 90935529- | 90936642- | | |
| | | | | 90937484 | 90936661 | | |
| 1110 | 84146 | ZNF644 | intron_08 | chr1: | chr1: | CUCUAAGUUGAAUGUGUCAG | − |
| | | | | 90935529- | 90936605- | | |
| | | | | 90937484 | 90936624 | | |
| 1111 | 84146 | ZNF644 | intron_08 | chr1: | chr1: | AAAACUGCAUUACAACUAUU | + |
| | | | | 90935529- | 90936498- | | |
| | | | | 90937484 | 90936517 | | |
| 1112 | 84146 | ZNF644 | intron_08 | chr1: | chr1: | UGUAAUGCAGUUUUGAUUUA | − |
| | | | | 90935529- | 90936492- | | |
| | | | | 90937484 | 90936511 | | |
| 1113 | 84146 | ZNF644 | intron_08 | chr1: | chr1: | GUAUGAGCUUCUGUUUAAUC | − |
| | | | | 90935529- | 90936424- | | |
| | | | | 90937484 | 90936443 | | |
| 1114 | 84146 | ZNF644 | intron_08 | chr1: | chr1: | CUUUAUUCGAAAGAAAAAGC | + |
| | | | | 90935529- | 90936402- | | |
| | | | | 90937484 | 90936421 | | |
| 1115 | 84146 | ZNF644 | intron_08 | chr1: | chr1: | UGUGUUAGCUGUGUUGACCA | − |
| | | | | 90935529- | 90936324- | | |
| | | | | 90937484 | 90936343 | | |
| 1116 | 84146 | ZNF644 | intron_08 | chr1: | chr1: | CUCUGAAGUAUACUACCCCU | + |
| | | | | 90935529- | 90936304- | | |
| | | | | 90937484 | 90936323 | | |
| 1117 | 84146 | ZNF644 | intron_08 | chr1: | chr1: | UGAGGAUUGUCUGAGAAGUU | − |
| | | | | 90935529- | 90936219- | | |
| | | | | 90937484 | 90936238 | | |
| 1118 | 84146 | ZNF644 | intron_08 | chr1: | chr1: | GCUAACAUCUUAGUCAUCAC | + |
| | | | | 90935529- | 90936166- | | |
| | | | | 90937484 | 90936185 | | |
| 1119 | 84146 | ZNF644 | intron_08 | chr1: | chr1: | UAGGCUUUCUGAUGAAGGCU | + |
| | | | | 90935529- | 90935988- | | |
| | | | | 90937484 | 90936007 | | |
| 1120 | 84146 | ZNF644 | intron_08 | chr1: | chr1: | AUUUAGUAUUGAGACUUUUA | − |
| | | | | 90935529- | 90935968- | | |
| | | | | 90937484 | 90935987 | | |
| 1121 | 84146 | ZNF644 | intron_08 | chr1: | chr1: | UUGAGACUUUUACGGUUUUG | − |
| | | | | 90935529- | 90935960- | | |
| | | | | 90937484 | 90935979 | | |
| 1122 | 84146 | ZNF644 | intron_08 | chr1: | chr1: | UGAGACUUUUACGGUUUUGU | − |
| | | | | 90935529- | 90935959- | | |
| | | | | 90937484 | 90935978 | | |
| 1123 | 84146 | ZNF644 | intron_08 | chr1: | chr1: | AACCGUGUUGUUCAAAUCAC | − |
| | | | | 90935529- | 90935851- | | |
| | | | | 90937484 | 90935870 | | |
| 1124 | 84146 | ZNF644 | intron_08 | chr1: | chr1: | UCACAGGAUUGUAUUGUAGU | − |
| | | | | 90935529- | 90935835- | | |
| | | | | 90937484 | 90935854 | | |
| 1125 | 84146 | ZNF644 | intron_08 | chr1: | chr1: | CUUGAACCUUUGAGCUCCUC | + |
| | | | | 90935529- | 90935751- | | |
| | | | | 90937484 | 90935770 | | |
| 1126 | 84146 | ZNF644 | intron_08 | chr1: | chr1: | GUAUAUCCAGAGGAGCUCAA | − |
| | | | | 90935529- | 90935760- | | |
| | | | | 90937484 | 90935779 | | |
| 1127 | 84146 | ZNF644 | intron_08 | chr1: | chr1: | GCUCUUUGGAAAGGUAGACG | + |
| | | | | 90935529- | 90935723- | | |
| | | | | 90937484 | 90935742 | | |
| 1128 | 84146 | ZNF644 | intron_08 | chr1: | chr1: | UCAACUCAUGCUCUUUGGAA | + |
| | | | | 90935529- | 90935714- | | |
| | | | | 90937484 | 90935733 | | |
| 1129 | 84146 | ZNF644 | intron_08 | chr1: | chr1: | GGUUAACUUAAAAUAAGGAG | + |
| | | | | 90935529- | 90935649- | | |
| | | | | 90937484 | 90935668 | | |
| 1130 | 84146 | ZNF644 | intron_08 | chr1: | chr1: | AAAUAGGUUAACUUAAAAUA | + |
| | | | | 90935529- | 90935644- | | |
| | | | | 90937484 | 90935663 | | |
| 1131 | 84146 | ZNF644 | exon_09_nc | chr1: | chr1: | AAGCGCGUAAGUGGUUGGAC | + |
| | | | | 90935408- | 90935447- | | |
| | | | | 90935528 | 90935466 | | |
| 1132 | 84146 | ZNF644 | exon_09_nc | chr1: | chr1: | UGCAUAAGCGCGUAAGUGGU | + |
| | | | | 90935408- | 90935442- | | |
| | | | | 90935528 | 90935461 | | |
| 1133 | 84146 | ZNF644 | exon_09_nc | chr1: | chr1: | UUCGUGCAUAAGCGCGUAAG | + |
| | | | | 90935408- | 90935438- | | |
| | | | | 90935528 | 90935457 | | |
| 1134 | 84146 | ZNF644 | exon_09_nc | chr1: | chr1: | UAUGCACGAAAGAAGAGUGC | − |
| | | | | 90935408- | 90935428- | | |
| | | | | 90935528 | 90935447 | | |
| 1135 | 84146 | ZNF644 | exon_09_nc | chr1: | chr1: | GCUGGACUUUUGACUGGUAC | − |
| | | | | 90935408- | 90935410- | | |
| | | | | 90935528 | 90935429 | | |
| 1136 | 84146 | ZNF644 | intron_09 | chr1: | chr1: | GAAUUAACACCAGUCUGGUG | + |
| | | | | 90918392- | 90935330- | | |
| | | | | 90935407 | 90935349 | | |
| 1137 | 84146 | ZNF644 | intron_09 | chr1: | chr1: | UGAAUUAACACCAGUCUGGU | + |
| | | | | 90918392- | 90935329- | | |
| | | | | 90935407 | 90935348 | | |
| 1138 | 84146 | ZNF644 | intron_09 | chr1: | chr1: | CUGAAUUAACACCAGUCUGG | + |
| | | | | 90918392- | 90935328- | | |
| | | | | 90935407 | 90935347 | | |
| 1139 | 84146 | ZNF644 | intron_09 | chr1: | chr1: | GAUCUGAAUUAACACCAGUC | + |
| | | | | 90918392- | 90935325- | | |
| | | | | 90935407 | 90935344 | | |
| 1140 | 84146 | ZNF644 | intron_09 | chr1: | chr1: | ACAAGUUGCUGAAAUUCAAU | + |
| | | | | 90918392- | 90935259- | | |
| | | | | 90935407 | 90935278 | | |
| 1141 | 84146 | ZNF644 | intron_09 | chr1: | chr1: | UACAAGUUGCUGAAAUUCAA | + |
| | | | | 90918392- | 90935258- | | |
| | | | | 90935407 | 90935277 | | |
| 1142 | 84146 | ZNF644 | intron_09 | chr1: | chr1: | GGCUCUUAUUGACUUAAUUU | − |
| | | | | 90918392- | 90935196- | | |
| | | | | 90935407 | 90935215 | | |
| 1143 | 84146 | ZNF644 | intron_09 | chr1: | chr1: | AAAAAUUAACCCAAGAGGUG | − |
| | | | | 90918392- | 90935168- | | |
| | | | | 90935407 | 90935187 | | |
| 1144 | 84146 | ZNF644 | intron_09 | chr1: | chr1: | CUAAAAAAUAAAUGGGAUUA | + |
| | | | | 90918392- | 90935129- | | |
| | | | | 90935407 | 90935148 | | |
| 1145 | 84146 | ZNF644 | intron_09 | chr1: | chr1: | CCGACUAGAACUAUAAAGAG | + |
| | | | | 90918392- | 90935060- | | |
| | | | | 90935407 | 90935079 | | |
| 1146 | 84146 | ZNF644 | intron_09 | chr1: | chr1: | AAAAUAUUGUAGUUCUAGCU | − |
| | | | | 90918392- | 90934900- | | |
| | | | | 90935407 | 90934919 | | |
| 1147 | 84146 | ZNF644 | intron_09 | chr1: | chr1: | AAAUAUUGUAGUUCUAGCUU | − |
| | | | | 90918392- | 90934899- | | |
| | | | | 90935407 | 90934918 | | |
| 1148 | 84146 | ZNF644 | intron_09 | chr1: | chr1: | GAAGGGGUGAGCCUUAAUAA | − |
| | | | | 90918392- | 90934769- | | |
| | | | | 90935407 | 90934788 | | |
| 1149 | 84146 | ZNF644 | intron_09 | chr1: | chr1: | UAAGAGGUAUCUGCAAGGUU | + |
| | | | | 90918392- | 90934621- | | |
| | | | | 90935407 | 90934640 | | |
| 1150 | 84146 | ZNF644 | intron_09 | chr1: | chr1: | UUAAGAGGUAUCUGCAAGGU | + |
| | | | | 90918392- | 90934620- | | |
| | | | | 90935407 | 90934639 | | |
| 1151 | 84146 | ZNF644 | intron_09 | chr1: | chr1: | AGUAUUAAGAGGUAUCUGCA | + |
| | | | | 90918392- | 90934616- | | |
| | | | | 90935407 | 90934635 | | |
| 1152 | 84146 | ZNF644 | intron_09 | chr1: | chr1: | AGGGUAUAUUUUAAGAUGUG | + |
| | | | | 90918392- | 90934473- | | |
| | | | | 90935407 | 90934492 | | |
| 1153 | 84146 | ZNF644 | intron_09 | chr1: | chr1: | GAUCUAAGUUCUAGGACAUG | + |
| | | | | 90918392- | 90934323- | | |
| | | | | 90935407 | 90934342 | | |
| 1154 | 84146 | ZNF644 | intron_09 | chr1: | chr1: | ACAUAUUGGAUCUAAGUUCU | + |
| | | | | 90918392- | 90934315- | | |
| | | | | 90935407 | 90934334 | | |
| 1155 | 84146 | ZNF644 | intron_09 | chr1: | chr1: | GACACUAGUAUAAAUAUAAG | + |
| | | | | 90918392- | 90934276- | | |
| | | | | 90935407 | 90934295 | | |
| 1156 | 84146 | ZNF644 | intron_09 | chr1: | chr1: | GUCAUUUGUAUAUCAAGUUA | + |
| | | | | 90918392- | 90934229- | | |
| | | | | 90935407 | 90934248 | | |
| 1157 | 84146 | ZNF644 | intron_09 | chr1: | chr1: | AACUUGAUAUACAAAUGACC | − |
| | | | | 90918392- | 90934228- | | |
| | | | | 90935407 | 90934247 | | |
| 1158 | 84146 | ZNF644 | intron_09 | chr1: | chr1: | ACUUGAUAUACAAAUGACCA | − |
| | | | | 90918392- | 90934227- | | |
| | | | | 90935407 | 90934246 | | |
| 1159 | 84146 | ZNF644 | intron_09 | chr1: | chr1: | AAAUUGUCAACAUUCAUCCC | + |
| | | | | 90918392- | 90934207- | | |
| | | | | 90935407 | 90934226 | | |
| 1160 | 84146 | ZNF644 | intron_09 | chr1: | chr1: | UGGGGUGAGUUUUAGUCUAC | − |
| | | | | 90918392- | 90934169- | | |
| | | | | 90935407 | 90934188 | | |
| 1161 | 84146 | ZNF644 | intron_09 | chr1: | chr1: | GAGUUUUAGUCUACUGGAUU | − |
| | | | | 90918392- | 90934163- | | |
| | | | | 90935407 | 90934182 | | |
| 1162 | 84146 | ZNF644 | intron_09 | chr1: | chr1: | UAUAUACCCUCACCUUUAUC | − |
| | | | | 90918392- | 90934115- | | |
| | | | | 90935407 | 90934134 | | |
| 1163 | 84146 | ZNF644 | intron_09 | chr1: | chr1: | UGAUUGCAGACAUUAGAGGU | − |
| | | | | 90918392- | 90934083- | | |
| | | | | 90935407 | 90934102 | | |
| 1164 | 84146 | ZNF644 | intron_09 | chr1: | chr1: | GAUUGCAGACAUUAGAGGUG | − |
| | | | | 90918392- | 90934082- | | |
| | | | | 90935407 | 90934101 | | |
| 1165 | 84146 | ZNF644 | intron_09 | chr1: | chr1: | UCAAUAAAAGUUAGCAAGUA | + |
| | | | | 90918392- | 90934010- | | |
| | | | | 90935407 | 90934029 | | |
| 1166 | 84146 | ZNF644 | intron_09 | chr1: | chr1: | UCCAGUACCUACAACUUGUA | + |
| | | | | 90918392- | 90933921- | | |
| | | | | 90935407 | 90933940 | | |
| 1167 | 84146 | ZNF644 | intron_09 | chr1: | chr1: | AAAAAUAGACCGCCUGUGUA | + |
| | | | | 90918392- | 90933762- | | |
| | | | | 90935407 | 90933781 | | |
| 1168 | 84146 | ZNF644 | intron_09 | chr1: | chr1: | GAAAAUUCUAAAAUGAAGGU | − |
| | | | | 90918392- | 90933695- | | |
| | | | | 90935407 | 90933714 | | |
| 1169 | 84146 | ZNF644 | intron_09 | chr1: | chr1: | CCCAUUUUAAACCCACCUUC | + |
| | | | | 90918392- | 90933359- | | |
| | | | | 90935407 | 90933378 | | |
| 1170 | 84146 | ZNF644 | intron_09 | chr1: | chr1: | GUUUAAAAUGGGGACUAUUC | − |
| | | | | 90918392- | 90933351- | | |
| | | | | 90935407 | 90933370 | | |
| 1171 | 84146 | ZNF644 | intron_09 | chr1: | chr1: | AUUUAGGCCUAAGCACUUCU | + |
| | | | | 90918392- | 90933282- | | |
| | | | | 90935407 | 90933301 | | |
| 1172 | 84146 | ZNF644 | intron_09 | chr1: | chr1: | AGGCCUAAAUUAGACUUUAG | − |
| | | | | 90918392- | 90933272- | | |
| | | | | 90935407 | 90933291 | | |
| 1173 | 84146 | ZNF644 | intron_09 | chr1: | chr1: | AUCUGCUUGAAUAAUCAGAA | + |
| | | | | 90918392- | 90933236- | | |
| | | | | 90935407 | 90933255 | | |
| 1174 | 84146 | ZNF644 | intron_09 | chr1: | chr1: | UGGACUAAUAAAAUCUGGAC | + |
| | | | | 90918392- | 90933183- | | |
| | | | | 90935407 | 90933202 | | |
| 1175 | 84146 | ZNF644 | intron_09 | chr1: | chr1: | AAAAGUAAUGUAGGAUGACU | − |
| | | | | 90918392- | 90933027- | | |
| | | | | 90935407 | 90933046 | | |
| 1176 | 84146 | ZNF644 | intron_09 | chr1: | chr1: | AACACCCUCUUUUAUUCUUC | + |
| | | | | 90918392- | 90932988- | | |
| | | | | 90935407 | 90933007 | | |
| 1177 | 84146 | ZNF644 | intron_09 | chr1: | chr1: | ACCAAAAUAUUAGAAGUACU | − |
| | | | | 90918392- | 90932944- | | |
| | | | | 90935407 | 90932963 | | |
| 1178 | 84146 | ZNF644 | intron_09 | chr1: | chr1: | AGCGUGUGUUUGGCAGUCCU | − |
| | | | | 90918392- | 90932913- | | |
| | | | | 90935407 | 90932932 | | |
| 1179 | 84146 | ZNF644 | intron_09 | chr1: | chr1: | GGUGUGGAAAAUAAGACCCU | + |
| | | | | 90918392- | 90932855- | | |
| | | | | 90935407 | 90932874 | | |
| 1180 | 84146 | ZNF644 | intron_09 | chr1: | chr1: | UCAAAAGUGGCUACUGGGUG | + |
| | | | | 90918392- | 90932839- | | |
| | | | | 90935407 | 90932858 | | |
| 1181 | 84146 | ZNF644 | intron_09 | chr1: | chr1: | GUUUCUCAAAAGUGGCUACU | + |
| | | | | 90918392- | 90932834- | | |
| | | | | 90935407 | 90932853 | | |
| 1182 | 84146 | ZNF644 | intron_09 | chr1: | chr1: | AGUUUCUCAAAAGUGGCUAC | + |
| | | | | 90918392- | 90932833- | | |
| | | | | 90935407 | 90932852 | | |
| 1183 | 84146 | ZNF644 | intron_09 | chr1: | chr1: | UAUGGGGGAUAAUCAGUAUG | + |
| | | | | 90918392- | 90932621- | | |
| | | | | 90935407 | 90932640 | | |
| 1184 | 84146 | ZNF644 | intron_09 | chr1: | chr1: | UAACAGUGAUAUUGAUAUGG | + |
| | | | | 90918392- | 90932606- | | |
| | | | | 90935407 | 90932625 | | |
| 1185 | 84146 | ZNF644 | intron_09 | chr1: | chr1: | UUAUAACAGUGAUAUUGAUA | + |
| | | | | 90918392- | 90932603- | | |
| | | | | 90935407 | 90932622 | | |
| 1186 | 84146 | ZNF644 | intron_09 | chr1: | chr1: | UUCUAGGGCCAUAGGUUUUU | + |
| | | | | 90918392- | 90932571- | | |
| | | | | 90935407 | 90932590 | | |
| 1187 | 84146 | ZNF644 | intron_09 | chr1: | chr1: | GUGGAACCUUCUAGGGCCAU | + |
| | | | | 90918392- | 90932563- | | |
| | | | | 90935407 | 90932582 | | |
| 1188 | 84146 | ZNF644 | intron_09 | chr1: | chr1: | UGGCCCUAGAAGGUUCCACU | − |
| | | | | 90918392- | 90932562- | | |
| | | | | 90935407 | 90932581 | | |
| 1189 | 84146 | ZNF644 | intron_09 | chr1: | chr1: | AAUCACUUAUAAUAACCAAG | + |
| | | | | 90918392- | 90932544- | | |
| | | | | 90935407 | 90932563 | | |
| 1190 | 84146 | ZNF644 | intron_09 | chr1: | chr1: | CAUUAAUUCAUAUGAGUAAC | − |
| | | | | 90918392- | 90932524- | | |
| | | | | 90935407 | 90932543 | | |
| 1191 | 84146 | ZNF644 | intron_09 | chr1: | chr1: | UCCAAUUUUGUGAUAUACUA | + |
| | | | | 90918392- | 90932432- | | |
| | | | | 90935407 | 90932451 | | |
| 1192 | 84146 | ZNF644 | intron_09 | chr1: | chr1: | ACCUUAGUAUAUCACAAAAU | − |
| | | | | 90918392- | 90932436- | | |
| | | | | 90935407 | 90932455 | | |
| 1193 | 84146 | ZNF644 | intron_09 | chr1: | chr1: | CAUACUGGACAUGGUUAGGG | + |
| | | | | 90918392- | 90932377- | | |
| | | | | 90935407 | 90932396 | | |
| 1194 | 84146 | ZNF644 | intron_09 | chr1: | chr1: | ACACAUACUGGACAUGGUUA | + |
| | | | | 90918392- | 90932374- | | |
| | | | | 90935407 | 90932393 | | |
| 1195 | 84146 | ZNF644 | intron_09 | chr1: | chr1: | CUAAGCUUUGUAUUCAAGAG | + |
| | | | | 90918392- | 90932302- | | |
| | | | | 90935407 | 90932321 | | |
| 1196 | 84146 | ZNF644 | intron_09 | chr1: | chr1: | GCCUUUACCAUUUAGUCUGA | + |
| | | | | 90918392- | 90932276- | | |
| | | | | 90935407 | 90932295 | | |
| 1197 | 84146 | ZNF644 | intron_09 | chr1: | chr1: | GGCCUUUACCAUUUAGUCUG | + |
| | | | | 90918392- | 90932275- | | |
| | | | | 90935407 | 90932294 | | |
| 1198 | 84146 | ZNF644 | intron_09 | chr1: | chr1: | UUAGAUACCCUCAGACUAAA | − |
| | | | | 90918392- | 90932286- | | |
| | | | | 90935407 | 90932305 | | |
| 1199 | 84146 | ZNF644 | intron_09 | chr1: | chr1: | ACCCUCAGACUAAAUGGUAA | − |
| | | | | 90918392- | 90932280- | | |
| | | | | 90935407 | 90932299 | | |
| 1200 | 84146 | ZNF644 | intron_09 | chr1: | chr1: | UUGAAAGUUUAUUCUAUCAC | + |
| | | | | 90918392- | 90932240- | | |
| | | | | 90935407 | 90932259 | | |
| 1201 | 84146 | ZNF644 | intron_09 | chr1: | chr1: | GGGAACUGGUGACCUUUUGA | − |
| | | | | 90918392- | 90932184- | | |
| | | | | 90935407 | 90932203 | | |
| 1202 | 84146 | ZNF644 | intron_09 | chr1: | chr1: | UUACCAGUAAACAGGUAUUU | + |
| | | | | 90918392- | 90932084- | | |
| | | | | 90935407 | 90932103 | | |
| 1203 | 84146 | ZNF644 | intron_09 | chr1: | chr1: | UAUUUAAGUUACCAGUAAAC | + |
| | | | | 90918392- | 90932076- | | |
| | | | | 90935407 | 90932095 | | |
| 1204 | 84146 | ZNF644 | intron_09 | chr1: | chr1: | CAUGAAAUUCUCAAAGAUGU | + |
| | | | | 90918392- | 90932016- | | |
| | | | | 90935407 | 90932035 | | |
| 1205 | 84146 | ZNF644 | intron_09 | chr1: | chr1: | AGACUUUGCGUAUCUCCUGA | − |
| | | | | 90918392- | 90931930- | | |
| | | | | 90935407 | 90931949 | | |
| 1206 | 84146 | ZNF644 | intron_09 | chr1: | chr1: | ACAAAUUGAUGAUAGCCUUC | + |
| | | | | 90918392- | 90931912- | | |
| | | | | 90935407 | 90931931 | | |
| 1207 | 84146 | ZNF644 | intron_09 | chr1: | chr1: | GCUAUCAUCAAUUUGUCUGA | − |
| | | | | 90918392- | 90931908- | | |
| | | | | 90935407 | 90931927 | | |
| 1208 | 84146 | ZNF644 | intron_09 | chr1: | chr1: | GUCUGAUGGCAAAUUGAGAA | − |
| | | | | 90918392- | 90931894- | | |
| | | | | 90935407 | 90931913 | | |
| 1209 | 84146 | ZNF644 | intron_09 | chr1: | chr1: | UAAUAGCAAAACUAAUUGUG | − |
| | | | | 90918392- | 90931765- | | |
| | | | | 90935407 | 90931784 | | |
| 1210 | 84146 | ZNF644 | intron_09 | chr1: | chr1: | CGGUUCCUUUUACAAAUAUU | + |
| | | | | 90918392- | 90931728- | | |
| | | | | 90935407 | 90931747 | | |
| 1211 | 84146 | ZNF644 | intron_09 | chr1: | chr1: | AUAUUUGUAAAAGGAACCGA | − |
| | | | | 90918392- | 90931727- | | |
| | | | | 90935407 | 90931746 | | |
| 1212 | 84146 | ZNF644 | intron_09 | chr1: | chr1: | UAUUUGUAAAAGGAACCGAU | − |
| | | | | 90918392- | 90931726- | | |
| | | | | 90935407 | 90931745 | | |
| 1213 | 84146 | ZNF644 | intron_09 | chr1: | chr1: | UUUGUAAAAGGAACCGAUGG | − |
| | | | | 90918392- | 90931724- | | |
| | | | | 90935407 | 90931743 | | |
| 1214 | 84146 | ZNF644 | intron_09 | chr1: | chr1: | AUCUUUCCUAUUUCCCCCAU | + |
| | | | | 90918392- | 90931708- | | |
| | | | | 90935407 | 90931727 | | |
| 1215 | 84146 | ZNF644 | intron_09 | chr1: | chr1: | AAGGAACCGAUGGGGGAAAU | − |
| | | | | 90918392- | 90931717- | | |
| | | | | 90935407 | 90931736 | | |
| 1216 | 84146 | ZNF644 | intron_09 | chr1: | chr1: | UUGGAAGAGGUGGGCAGACU | − |
| | | | | 90918392- | 90931674- | | |
| | | | | 90935407 | 90931693 | | |
| 1217 | 84146 | ZNF644 | intron_09 | chr1: | chr1: | GUCCCAGUUUAUCUUCUGUU | |
| | | | | 90918392- | 90931595- | | |
| | | | | 90935407 | 90931614 | | |
| 1218 | 84146 | ZNF644 | intron_09 | chr1: | chr1: | CAGUUUAUCUUCUGUUGGGU | − |
| | | | | 90918392- | 90931591- | | |
| | | | | 90935407 | 90931610 | | |
| 1219 | 84146 | ZNF644 | intron_09 | chr1: | chr1: | GAUAAAGAUUGAUCGGGGAA | + |
| | | | | 90918392- | 90931497- | | |
| | | | | 90935407 | 90931516 | | |
| 1220 | 84146 | ZNF644 | intron_09 | chr1: | chr1: | AUUUUGAUAAAGAUUGAUCG | + |
| | | | | 90918392- | 90931492- | | |
| | | | | 90935407 | 90931511 | | |
| 1221 | 84146 | ZNF644 | intron_09 | chr1: | chr1: | UCAAAAUAGACUAGAAUCAA | − |
| | | | | 90918392- | 90931479- | | |
| | | | | 90935407 | 90931498 | | |
| 1222 | 84146 | ZNF644 | intron_09 | chr1: | chr1: | UAUGGAAUGCAGUAAUGGUA | − |
| | | | | 90918392- | 90931389- | | |
| | | | | 90935407 | 90931408 | | |
| 1223 | 84146 | ZNF644 | intron_09 | chr1: | chr1: | AUGGAAUGCAGUAAUGGUAG | − |
| | | | | 90918392- | 90931388- | | |
| | | | | 90935407 | 90931407 | | |
| 1224 | 84146 | ZNF644 | intron_09 | chr1: | chr1: | CAUCAUUUAAUUAAAACAUU | + |
| | | | | 90918392- | 90931176- | | |
| | | | | 90935407 | 90931195 | | |
| 1225 | 84146 | ZNF644 | intron_09 | chr1: | chr1: | AGUACUUAGGUGUGACAACA | + |
| | | | | 90918392- | 90931080- | | |
| | | | | 90935407 | 90931099 | | |
| 1226 | 84146 | ZNF644 | intron_09 | chr1: | chr1: | UAUCAACCUAAUCUGCAAUC | − |
| | | | | 90918392- | 90930958- | | |
| | | | | 90935407 | 90930977 | | |
| 1227 | 84146 | ZNF644 | intron_09 | chr1: | chr1: | AAGAGUGAAUUUCAACAGGU | − |
| | | | | 90918392- | 90930908- | | |
| | | | | 90935407 | 90930927 | | |
| 1228 | 84146 | ZNF644 | intron_09 | chr1: | chr1: | AGAGUGAAUUUCAACAGGUA | − |
| | | | | 90918392- | 90930907- | | |
| | | | | 90935407 | 90930926 | | |
| 1229 | 84146 | ZNF644 | intron_09 | chr1: | chr1: | UCUACCAUAGAAAAGCAUUG | + |
| | | | | 90918392- | 90930822- | | |
| | | | | 90935407 | 90930841 | | |
| 1230 | 84146 | ZNF644 | intron_09 | chr1: | chr1: | UUAAUGUAAGUUUGUACAUG | + |
| | | | | 90918392- | 90930717- | | |
| | | | | 90935407 | 90930736 | | |
| 1231 | 84146 | ZNF644 | intron_09 | chr1: | chr1: | UACAUUUAGGUGAGUACACA | + |
| | | | | 90918392- | 90930679- | | |
| | | | | 90935407 | 90930698 | | |
| 1232 | 84146 | ZNF644 | intron_09 | chr1: | chr1: | AUGAUAGUGACUUCUUAAGU | + |
| | | | | 90918392- | 90930578- | | |
| | | | | 90935407 | 90930597 | | |
| 1233 | 84146 | ZNF644 | intron_09 | chr1: | chr1: | UGCCUCUUUCUCUUAGGGGU | − |
| | | | | 90918392- | 90930536- | | |
| | | | | 90935407 | 90930555 | | |
| 1234 | 84146 | ZNF644 | intron_09 | chr1: | chr1: | UAGGGGUUGGUACUGACCAA | − |
| | | | | 90918392- | 90930523- | | |
| | | | | 90935407 | 90930542 | | |
| 1235 | 84146 | ZNF644 | intron_09 | chr1: | chr1: | AUCUAAGAUACUACUACCAU | + |
| | | | | 90918392- | 90930504- | | |
| | | | | 90935407 | 90930523 | | |
| 1236 | 84146 | ZNF644 | intron_09 | chr1: | chr1: | UAGAUGUCAUAACUCUUCUG | − |
| | | | | 90918392- | 90930489- | | |
| | | | | 90935407 | 90930508 | | |
| 1237 | 84146 | ZNF644 | intron_09 | chr1: | chr1: | GUAAAUCAAAUGCUAACCUC | − |
| | | | | 90918392- | 90930409- | | |
| | | | | 90935407 | 90930428 | | |
| 1238 | 84146 | ZNF644 | intron_09 | chr1: | chr1: | CCAAUUACUUUAAGUCCCAG | + |
| | | | | 90918392- | 90930390- | | |
| | | | | 90935407 | 90930409 | | |
| 1239 | 84146 | ZNF644 | intron_09 | chr1: | chr1: | CCUCUGGGACUUAAAGUAAU | − |
| | | | | 90918392- | 90930393- | | |
| | | | | 90935407 | 90930412 | | |
| 1240 | 84146 | ZNF644 | intron_09 | chr1: | chr1: | AACGUAUCAAGAAAGUGUUC | + |
| | | | | 90918392- | 90929983- | | |
| | | | | 90935407 | 90930002 | | |
| 1241 | 84146 | ZNF644 | intron_09 | chr1: | chr1: | AACACUUUCUUGAUACGUUU | − |
| | | | | 90918392- | 90929982- | | |
| | | | | 90935407 | 90930001 | | |
| 1242 | 84146 | ZNF644 | intron_09 | chr1: | chr1: | GUUGUAGAAUAGCAACAAUU | + |
| | | | | 90918392- | 90929948- | | |
| | | | | 90935407 | 90929967 | | |
| 1243 | 84146 | ZNF644 | intron_09 | chr1: | chr1: | UGUUGUAGAAUAGCAACAAU | + |
| | | | | 90918392- | 90929947- | | |
| | | | | 90935407 | 90929966 | | |
| 1244 | 84146 | ZNF644 | intron_09 | chr1: | chr1: | AUUAUUUGACUUUUCUGAUG | − |
| | | | | 90918392- | 90929909- | | |
| | | | | 90935407 | 90929928 | | |
| 1245 | 84146 | ZNF644 | intron_09 | chr1: | chr1: | CGAUUACACUUAAAAGUAAA | + |
| | | | | 90918392- | 90929819- | | |
| | | | | 90935407 | 90929838 | | |
| 1246 | 84146 | ZNF644 | intron_09 | chr1: | chr1: | CUUUUAAGUGUAAUCGUAGU | − |
| | | | | 90918392- | 90929815- | | |
| | | | | 90935407 | 90929834 | | |
| 1247 | 84146 | ZNF644 | intron_09 | chr1: | chr1: | AAUGAUAUAAUUGGCCACAC | − |
| | | | | 90918392- | 90929768- | | |
| | | | | 90935407 | 90929787 | | |
| 1248 | 84146 | ZNF644 | intron_09 | chr1: | chr1: | GCACAGUAUCAAGUGCUGAA | − |
| | | | | 90918392- | 90929718- | | |
| | | | | 90935407 | 90929737 | | |
| 1249 | 84146 | ZNF644 | intron_09 | chr1: | chr1: | CAUAAGAAUGACUUUUCUAG | + |
| | | | | 90918392- | 90929683- | | |
| | | | | 90935407 | 90929702 | | |
| 1250 | 84146 | ZNF644 | intron_09 | chr1: | chr1: | UUAUGUUGUGGAAAGUGCUA | − |
| | | | | 90918392- | 90929668- | | |
| | | | | 90935407 | 90929687 | | |
| 1251 | 84146 | ZNF644 | intron_09 | chr1: | chr1: | CUUGACAAUUCUUCCAGACU | − |
| | | | | 90918392- | 90929401- | | |
| | | | | 90935407 | 90929420 | | |
| 1252 | 84146 | ZNF644 | intron_09 | chr1: | chr1: | AAUUCUUCCAGACUGGGCUG | − |
| | | | | 90918392- | 90929395- | | |
| | | | | 90935407 | 90929414 | | |
| 1253 | 84146 | ZNF644 | intron_09 | chr1: | chr1: | UCUUCCAGACUGGGCUGAGG | − |
| | | | | 90918392- | 90929392- | | |
| | | | | 90935407 | 90929411 | | |
| 1254 | 84146 | ZNF644 | intron_09 | chr1: | chr1: | UAUACAACUAAAUGGCAUAU | − |
| | | | | 90918392- | 90929266- | | |
| | | | | 90935407 | 90929285 | | |
| 1255 | 84146 | ZNF644 | intron_09 | chr1: | chr1: | UUAGUCUAAGCCUCCUUUUG | − |
| | | | | 90918392- | 90929210- | | |
| | | | | 90935407 | 90929229 | | |
| 1256 | 84146 | ZNF644 | intron_09 | chr1: | chr1: | GUAAGGGCAUCAGAAAAAAA | + |
| | | | | 90918392- | 90929165- | | |
| | | | | 90935407 | 90929184 | | |
| 1257 | 84146 | ZNF644 | intron_09 | chr1: | chr1: | AUUCAAUGAGACAAACAGUA | + |
| | | | | 90918392- | 90929148- | | |
| | | | | 90935407 | 90929167 | | |
| 1258 | 84146 | ZNF644 | intron_09 | chr1: | chr1: | GGCUCAGCGAUGAACAGUCU | + |
| | | | | 90918392- | 90928981- | | |
| | | | | 90935407 | 90929000 | | |
| 1259 | 84146 | ZNF644 | intron_09 | chr1: | chr1: | UAAACAUAAUAUAACCCAGU | − |
| | | | | 90918392- | 90928935- | | |
| | | | | 90935407 | 90928954 | | |
| 1260 | 84146 | ZNF644 | intron_09 | chr1: | chr1: | CAUACUUGAUCUUUUCCCAC | + |
| | | | | 90918392- | 90928917- | | |
| | | | | 90935407 | 90928936 | | |
| 1261 | 84146 | ZNF644 | intron_09 | chr1: | chr1: | CCAUAUAAACCCUUCUGUAA | + |
| | | | | 90918392- | 90928894- | | |
| | | | | 90935407 | 90928913 | | |
| 1262 | 84146 | ZNF644 | intron_09 | chr1: | chr1: | AUCAAGUAUGCCAUUACAGA | − |
| | | | | 90918392- | 90928907- | | |
| | | | | 90935407 | 90928926 | | |
| 1263 | 84146 | ZNF644 | intron_09 | chr1: | chr1: | UCAAGUAUGCCAUUACAGAA | − |
| | | | | 90918392- | 90928906- | | |
| | | | | 90935407 | 90928925 | | |
| 1264 | 84146 | ZNF644 | intron_09 | chr1: | chr1: | CCAUUACAGAAGGGUUUAUA | − |
| | | | | 90918392- | 90928897- | | |
| | | | | 90935407 | 90928916 | | |
| 1265 | 84146 | ZNF644 | intron_09 | chr1: | chr1: | GAAGGAUGCAGUAGAGUUUU | − |
| | | | | 90918392- | 90928853- | | |
| | | | | 90935407 | 90928872 | | |
| 1266 | 84146 | ZNF644 | intron_09 | chr1: | chr1: | GAUGAAGUGUAGAAUAUUUC | − |
| | | | | 90918392- | 90928823- | | |
| | | | | 90935407 | 90928842 | | |
| 1267 | 84146 | ZNF644 | intron_09 | chr1: | chr1: | AAAUUUGGACUUCAAGUGUC | − |
| | | | | 90918392- | 90928767- | | |
| | | | | 90935407 | 90928786 | | |
| 1268 | 84146 | ZNF644 | intron_09 | chr1: | chr1: | UGGACUUCAAGUGUCAGGAG | − |
| | | | | 90918392- | 90928762- | | |
| | | | | 90935407 | 90928781 | | |
| 1269 | 84146 | ZNF644 | intron_09 | chr1: | chr1: | CAAGUGUCAGGAGUGGAACU | − |
| | | | | 90918392- | 90928755- | | |
| | | | | 90935407 | 90928774 | | |
| 1270 | 84146 | ZNF644 | intron_09 | chr1: | chr1: | AGUUCAAGUGUCAGAAGAUU | − |
| | | | | 90918392- | 90928732- | | |
| | | | | 90935407 | 90928751 | | |
| 1271 | 84146 | ZNF644 | intron_09 | chr1: | chr1: | AAGCACCAACCCCACCUUUC | + |
| | | | | 90918392- | 90928679- | | |
| | | | | 90935407 | 90928698 | | |
| 1272 | 84146 | ZNF644 | intron_09 | chr1: | chr1: | AUUGUAGUGCCAGAAAGGUG | − |
| | | | | 90918392- | 90928691- | | |
| | | | | 90935407 | 90928710 | | |
| 1273 | 84146 | ZNF644 | intron_09 | chr1: | chr1: | CAAUAACCACCAAAAUGGUU | + |
| | | | | 90918392- | 90927507- | | |
| | | | | 90935407 | 90927526 | | |
| 1274 | 84146 | ZNF644 | intron_09 | chr1: | chr1: | AAUUAUAUCCAAGCUACUCA | + |
| | | | | 90918392- | 90927459- | | |
| | | | | 90935407 | 90927478 | | |
| 1275 | 84146 | ZNF644 | intron_09 | chr1: | chr1: | AAUUAGUAGAGUAUCUAUAA | + |
| | | | | 90918392- | 90927416- | | |
| | | | | 90935407 | 90927435 | | |
| 1276 | 84146 | ZNF644 | intron_09 | chr1: | chr1: | CAAUUAGUAGAGUAUCUAUA | + |
| | | | | 90918392- | 90927415- | | |
| | | | | 90935407 | 90927434 | | |
| 1277 | 84146 | ZNF644 | intron_09 | chr1: | chr1: | AGAAAUAGCCUAAUUCUUGC | + |
| | | | | 90918392- | 90927382- | | |
| | | | | 90935407 | 90927401 | | |
| 1278 | 84146 | ZNF644 | intron_09 | chr1: | chr1: | UUAUUAUUCCAGCAAGAAUU | − |
| | | | | 90918392- | 90927393- | | |
| | | | | 90935407 | 90927412 | | |
| 1279 | 84146 | ZNF644 | intron_09 | chr1: | chr1: | CCGAUCAUUUUUUUGUAUGG | + |
| | | | | 90918392- | 90927359- | | |
| | | | | 90935407 | 90927378 | | |
| 1280 | 84146 | ZNF644 | intron_09 | chr1: | chr1: | CAGCCGAUCAUUUUUUUGUA | + |
| | | | | 90918392- | 90927356- | | |
| | | | | 90935407 | 90927375 | | |
| 1281 | 84146 | ZNF644 | intron_09 | chr1: | chr1: | CUCUGCAUACUUAGCACAGU | + |
| | | | | 90918392- | 90927297- | | |
| | | | | 90935407 | 90927316 | | |
| 1282 | 84146 | ZNF644 | intron_09 | chr1: | chr1: | UUUCACGCAUACCUCUCCAA | + |
| | | | | 90918392- | 90927203- | | |
| | | | | 90935407 | 90927222 | | |
| 1283 | 84146 | ZNF644 | intron_09 | chr1: | chr1: | AAUGCUAAUUCCAAAAGCCU | + |
| | | | | 90918392- | 90927127- | | |
| | | | | 90935407 | 90927146 | | |
| 1284 | 84146 | ZNF644 | intron_09 | chr1: | chr1: | UCCACCUUGCUCCCUCUUUC | + |
| | | | | 90918392- | 90927040- | | |
| | | | | 90935407 | 90927059 | | |
| 1285 | 84146 | ZNF644 | intron_09 | chr1: | chr1: | AGAACGCUAGUCUAAGAUGU | − |
| | | | | 90918392- | 90926933- | | |
| | | | | 90935407 | 90926952 | | |
| 1286 | 84146 | ZNF644 | intron_09 | chr1: | chr1: | UGUUGGAAUUAACUUUGUAG | − |
| | | | | 90918392- | 90926916- | | |
| | | | | 90935407 | 90926935 | | |
| 1287 | 84146 | ZNF644 | intron_09 | chr1: | chr1: | UUGGAAUUAACUUUGUAGUG | − |
| | | | | 90918392- | 90926914- | | |
| | | | | 90935407 | 90926933 | | |
| 1288 | 84146 | ZNF644 | intron_09 | chr1: | chr1: | CAGUGACAUUAAGAAUGUAA | − |
| | | | | 90918392- | 90926776- | | |
| | | | | 90935407 | 90926795 | | |
| 1289 | 84146 | ZNF644 | intron_09 | chr1: | chr1: | AGGAGGGGUACUAGAUGUAU | − |
| | | | | 90918392- | 90926756- | | |
| | | | | 90935407 | 90926775 | | |
| 1290 | 84146 | ZNF644 | intron_09 | chr1: | chr1: | UAGAUGUAUGGGUAAUAUUA | − |
| | | | | 90918392- | 90926745- | | |
| | | | | 90935407 | 90926764 | | |
| 1291 | 84146 | ZNF644 | intron_09 | chr1: | chr1: | CUCAAGAUUUUAAAUCUGAG | − |
| | | | | 90918392- | 90926679- | | |
| | | | | 90935407 | 90926698 | | |
| 1292 | 84146 | ZNF644 | intron_09 | chr1: | chr1: | UCAAGAUUUUAAAUCUGAGU | − |
| | | | | 90918392- | 90926678- | | |
| | | | | 90935407 | 90926697 | | |
| 1293 | 84146 | ZNF644 | intron_09 | chr1: | chr1: | AGAUUUUAAAUCUGAGUGGG | − |
| | | | | 90918392- | 90926675- | | |
| | | | | 90935407 | 90926694 | | |
| 1294 | 84146 | ZNF644 | intron_09 | chr1: | chr1: | UUUUAAAUCUGAGUGGGAGG | − |
| | | | | 90918392- | 90926672- | | |
| | | | | 90935407 | 90926691 | | |
| 1295 | 84146 | ZNF644 | intron_09 | chr1: | chr1: | AGCAGAUUGAUUAACUGUAC | + |
| | | | | 90918392- | 90926637- | | |
| | | | | 90935407 | 90926656 | | |
| 1296 | 84146 | ZNF644 | intron_09 | chr1: | chr1: | UGCCCUUCUACCAGACAGCA | + |
| | | | | 90918392- | 90926613- | | |
| | | | | 90935407 | 90926632 | | |
| 1297 | 84146 | ZNF644 | intron_09 | chr1: | chr1: | UACCAUGCUGUCUGGUAGAA | − |
| | | | | 90918392- | 90926618- | | |
| | | | | 90935407 | 90926637 | | |
| 1298 | 84146 | ZNF644 | intron_09 | chr1: | chr1: | ACUUUGUUAUAGUGGAUAGC | + |
| | | | | 90918392- | 90926547- | | |
| | | | | 90935407 | 90926566 | | |
| 1299 | 84146 | ZNF644 | intron_09 | chr1: | chr1: | AAGGUGAUACUUUGUUAUAG | + |
| | | | | 90918392- | 90926539- | | |
| | | | | 90935407 | 90926558 | | |
| 1300 | 84146 | ZNF644 | intron_09 | chr1: | chr1: | GGUCCAUGAAGGCUGCACAU | + |
| | | | | 90918392- | 90926179- | | |
| | | | | 90935407 | 90926198 | | |
| 1301 | 84146 | ZNF644 | intron_09 | chr1: | chr1: | UGGUUCUAGCUGGUCCAUGA | + |
| | | | | 90918392- | 90926168- | | |
| | | | | 90935407 | 90926187 | | |
| 1302 | 84146 | ZNF644 | intron_09 | chr1: | chr1: | GAGGUAAAGCAAGUCUCGUU | + |
| | | | | 90918392- | 90925966- | | |
| | | | | 90935407 | 90925985 | | |
| 1303 | 84146 | ZNF644 | intron_09 | chr1: | chr1: | AAGUUCUACAGCAGACUGAA | + |
| | | | | 90918392- | 90925873- | | |
| | | | | 90935407 | 90925892 | | |
| 1304 | 84146 | ZNF644 | intron_09 | chr1: | chr1: | ACUUACUGAUUCAACAAGUG | + |
| | | | | 90918392- | 90925817- | | |
| | | | | 90935407 | 90925836 | | |
| 1305 | 84146 | ZNF644 | intron_09 | chr1: | chr1: | GCUACAAUGGUGUAACUCUU | + |
| | | | | 90918392- | 90925774- | | |
| | | | | 90935407 | 90925793 | | |
| 1306 | 84146 | ZNF644 | intron_09 | chr1: | chr1: | UGCUGCUCAUUGGUUUCAUA | − |
| | | | | 90918392- | 90925721- | | |
| | | | | 90935407 | 90925740 | | |
| 1307 | 84146 | ZNF644 | intron_09 | chr1: | chr1: | AUUAAACCAAUAGUAAUGCU | + |
| | | | | 90918392- | 90925641- | | |
| | | | | 90935407 | 90925660 | | |
| 1308 | 84146 | ZNF644 | intron_09 | chr1: | chr1: | UAGUUUCCUAGCAUUACUAU | − |
| | | | | 90918392- | 90925650- | | |
| | | | | 90935407 | 90925669 | | |
| 1309 | 84146 | ZNF644 | intron_09 | chr1: | chr1: | GGAGGGCAAUUGUUUAAACU | + |
| | | | | 90918392- | 90925209- | | |
| | | | | 90935407 | 90925228 | | |
| 1310 | 84146 | ZNF644 | intron_09 | chr1: | chr1: | CAUGCCCCCCACUGGGGGGA | + |
| | | | | 90918392- | 90925192- | | |
| | | | | 90935407 | 90925211 | | |
| 1311 | 84146 | ZNF644 | intron_09 | chr1: | chr1: | UCAUGCCCCCCACUGGGGGG | + |
| | | | | 90918392- | 90925191- | | |
| | | | | 90935407 | 90925210 | | |
| 1312 | 84146 | ZNF644 | intron_09 | chr1: | chr1: | ACUCUCAUGCCCCCCACUGG | + |
| | | | | 90918392- | 90925187- | | |
| | | | | 90935407 | 90925206 | | |
| 1313 | 84146 | ZNF644 | intron_09 | chr1: | chr1: | UGACUCUCAUGCCCCCCACU | + |
| | | | | 90918392- | 90925185- | | |
| | | | | 90935407 | 90925204 | | |
| 1314 | 84146 | ZNF644 | intron_09 | chr1: | chr1: | UUGACUCUCAUGCCCCCCAC | + |
| | | | | 90918392- | 90925184- | | |
| | | | | 90935407 | 90925203 | | |
| 1315 | 84146 | ZNF644 | intron_09 | chr1: | chr1: | CACAGUAUGCAAGAUUUACC | + |
| | | | | 90918392- | 90925128- | | |
| | | | | 90935407 | 90925147 | | |
| 1316 | 84146 | ZNF644 | intron_09 | chr1: | chr1: | CUUGAAUGCGGUUUGUAAUC | − |
| | | | | 90918392- | 90925063- | | |
| | | | | 90935407 | 90925082 | | |
| 1317 | 84146 | ZNF644 | intron_09 | chr1: | chr1: | ACAUGCCUUGUUAUAUUAUA | + |
| | | | | 90918392- | 90925020- | | |
| | | | | 90935407 | 90925039 | | |
| 1318 | 84146 | ZNF644 | intron_09 | chr1: | chr1: | CAUUACCUAAAAUUUAGCUC | + |
| | | | | 90918392- | 90924991- | | |
| | | | | 90935407 | 90925010 | | |
| 1319 | 84146 | ZNF644 | intron_09 | chr1: | chr1: | AACACUCAGACUUUCUCUAU | − |
| | | | | 90918392- | 90924941- | | |
| | | | | 90935407 | 90924960 | | |
| 1320 | 84146 | ZNF644 | intron_09 | chr1: | chr1: | ACUCAGACUUUCUCUAUUGG | − |
| | | | | 90918392- | 90924938- | | |
| | | | | 90935407 | 90924957 | | |
| 1321 | 84146 | ZNF644 | intron_09 | chr1: | chr1: | CUAUUGGAGGUUAGGGCAAA | − |
| | | | | 90918392- | 90924925- | | |
| | | | | 90935407 | 90924944 | | |
| 1322 | 84146 | ZNF644 | intron_09 | chr1: | chr1: | AGGGCAAAAGGAUGGCUUAU | − |
| | | | | 90918392- | 90924913- | | |
| | | | | 90935407 | 90924932 | | |
| 1323 | 84146 | ZNF644 | intron_09 | chr1: | chr1: | GUAUUUAAUUGUAGCUUAGC | − |
| | | | | 90918392- | 90924773- | | |
| | | | | 90935407 | 90924792 | | |
| 1324 | 84146 | ZNF644 | intron_09 | chr1: | chr1: | UAUCUGAUCAAUACCAUGUU | − |
| | | | | 90918392- | 90924730- | | |
| | | | | 90935407 | 90924749 | | |
| 1325 | 84146 | ZNF644 | intron_09 | chr1: | chr1: | UGGUCGCAAUGGAUCUGAUU | + |
| | | | | 90918392- | 90924646- | | |
| | | | | 90935407 | 90924665 | | |
| 1326 | 84146 | ZNF644 | intron_09 | chr1: | chr1: | GCACAAAUCCAUGGUCGCAA | + |
| | | | | 90918392- | 90924635- | | |
| | | | | 90935407 | 90924654 | | |
| 1327 | 84146 | ZNF644 | intron_09 | chr1: | chr1: | AAUCAGAUCCAUUGCGACCA | − |
| | | | | 90918392- | 90924646- | | |
| | | | | 90935407 | 90924665 | | |
| 1328 | 84146 | ZNF644 | intron_09 | chr1: | chr1: | AUCUAAAUGGCACAAAUCCA | + |
| | | | | 90918392- | 90924626- | | |
| | | | | 90935407 | 90924645 | | |
| 1329 | 84146 | ZNF644 | intron_09 | chr1: | chr1: | AUAUUUACCUUAAAUUAGAU | + |
| | | | | 90918392- | 90924581- | | |
| | | | | 90935407 | 90924600 | | |
| 1330 | 84146 | ZNF644 | intron_09 | chr1: | chr1: | UGUGAGUCCUAUCUAAUUUA | − |
| | | | | 90918392- | 90924591- | | |
| | | | | 90935407 | 90924610 | | |
| 1331 | 84146 | ZNF644 | intron_09 | chr1: | chr1: | CAGAAAUACGGAGAUUUUAG | − |
| | | | | 90918392- | 90924452- | | |
| | | | | 90935407 | 90924471 | | |
| 1332 | 84146 | ZNF644 | intron_09 | chr1: | chr1: | AGAAAUACGGAGAUUUUAGA | − |
| | | | | 90918392- | 90924451- | | |
| | | | | 90935407 | 90924470 | | |
| 1333 | 84146 | ZNF644 | intron_09 | chr1: | chr1: | AUACGGAGAUUUUAGAGGGC | − |
| | | | | 90918392- | 90924447- | | |
| | | | | 90935407 | 90924466 | | |
| 1334 | 84146 | ZNF644 | intron_09 | chr1: | chr1: | ACAAAAGUGGUUGAUGUUGA | − |
| | | | | 90918392- | 90924328- | | |
| | | | | 90935407 | 90924347 | | |
| 1335 | 84146 | ZNF644 | intron_09 | chr1: | chr1: | GCCGUUUUAUUAAGCAAAAU | + |
| | | | | 90918392- | 90924296- | | |
| | | | | 90935407 | 90924315 | | |
| 1336 | 84146 | ZNF644 | intron_09 | chr1: | chr1: | GCCUAUUUUGCUUAAUAAAA | − |
| | | | | 90918392- | 90924300- | | |
| | | | | 90935407 | 90924319 | | |
| 1337 | 84146 | ZNF644 | intron_09 | chr1: | chr1: | GCAAACGUAUUACUUCUUUG | + |
| | | | | 90918392- | 90924217- | | |
| | | | | 90935407 | 90924236 | | |
| 1338 | 84146 | ZNF644 | intron_09 | chr1: | chr1: | UACUGGUCAGCUGAGUUGAU | + |
| | | | | 90918392- | 90924191- | | |
| | | | | 90935407 | 90924210 | | |
| 1339 | 84146 | ZNF644 | intron_09 | chr1: | chr1: | CACAACUACAAGUGGCUUAC | + |
| | | | | 90918392- | 90924174- | | |
| | | | | 90935407 | 90924193 | | |
| 1340 | 84146 | ZNF644 | intron_09 | chr1: | chr1: | AACAAUAUCACAACUACAAG | + |
| | | | | 90918392- | 90924166- | | |
| | | | | 90935407 | 90924185 | | |
| 1341 | 84146 | ZNF644 | intron_09 | chr1: | chr1: | UAUAAACAGGAAUUAGAGGC | + |
| | | | | 90918392- | 90924108- | | |
| | | | | 90935407 | 90924127 | | |
| 1342 | 84146 | ZNF644 | intron_09 | chr1: | chr1: | UAGAGGGGAUGAUUACUAAA | + |
| | | | | 90918392- | 90924011- | | |
| | | | | 90935407 | 90924030 | | |
| 1343 | 84146 | ZNF644 | intron_09 | chr1: | chr1: | UCCACUAUUUCAAAGUAGAG | + |
| | | | | 90918392- | 90923996- | | |
| | | | | 90935407 | 90924015 | | |
| 1344 | 84146 | ZNF644 | intron_09 | chr1: | chr1: | CUCCACUAUUUCAAAGUAGA | + |
| | | | | 90918392- | 90923995- | | |
| | | | | 90935407 | 90924014 | | |
| 1345 | 84146 | ZNF644 | intron_09 | chr1: | chr1: | AAUUAUUAGUCCACAAGGAC | + |
| | | | | 90918392- | 90923824- | | |
| | | | | 90935407 | 90923843 | | |
| 1346 | 84146 | ZNF644 | intron_09 | chr1: | chr1: | UUUACAAUUAUUAGUCCACA | + |
| | | | | 90918392- | 90923819- | | |
| | | | | 90935407 | 90923838 | | |
| 1347 | 84146 | ZNF644 | intron_09 | chr1: | chr1: | UUUUUUUCAGUCAUUGGGAG | − |
| | | | | 90918392- | 90923661- | | |
| | | | | 90935407 | 90923680 | | |
| 1348 | 84146 | ZNF644 | intron_09 | chr1: | chr1: | GAAGUAUAAAGAUACACAUU | + |
| | | | | 90918392- | 90923528- | | |
| | | | | 90935407 | 90923547 | | |
| 1349 | 84146 | ZNF644 | intron_09 | chr1: | chr1: | AUACUUCAUGCCUGACUGUA | − |
| | | | | 90918392- | 90923515- | | |
| | | | | 90935407 | 90923534 | | |
| 1350 | 84146 | ZNF644 | intron_09 | chr1: | chr1: | AACUGAUGUUGAUAGGAGUA | − |
| | | | | 90918392- | 90923423- | | |
| | | | | 90935407 | 90923442 | | |
| 1351 | 84146 | ZNF644 | intron_09 | chr1: | chr1: | AUUUUAAUACUGUGUAGAGU | − |
| | | | | 90918392- | 90923388- | | |
| | | | | 90935407 | 90923407 | | |
| 1352 | 84146 | ZNF644 | intron_09 | chr1: | chr1: | UCUCUCGGCCCAUUCAAAAA | + |
| | | | | 90918392- | 90923331- | | |
| | | | | 90935407 | 90923350 | | |
| 1353 | 84146 | ZNF644 | intron_09 | chr1: | chr1: | UUGAAUGGGCCGAGAGAUUG | − |
| | | | | 90918392- | 90923328- | | |
| | | | | 90935407 | 90923347 | | |
| 1354 | 84146 | ZNF644 | intron_09 | chr1: | chr1: | UGAAUGGGCCGAGAGAUUGA | − |
| | | | | 90918392- | 90923327- | | |
| | | | | 90935407 | 90923346 | | |
| 1355 | 84146 | ZNF644 | intron_09 | chr1: | chr1: | GAAUGGGCCGAGAGAUUGAG | − |
| | | | | 90918392- | 90923326- | | |
| | | | | 90935407 | 90923345 | | |
| 1356 | 84146 | ZNF644 | intron_09 | chr1: | chr1: | AUUUAUGAUAGUAGAUACUC | − |
| | | | | 90918392- | 90923280- | | |
| | | | | 90935407 | 90923299 | | |
| 1357 | 84146 | ZNF644 | intron_09 | chr1: | chr1: | GACUUUGCAAAUAGCAGCCC | + |
| | | | | 90918392- | 90923252- | | |
| | | | | 90935407 | 90923271 | | |
| 1358 | 84146 | ZNF644 | intron_09 | chr1: | chr1: | CCAACUUACACAGUCACAUA | + |
| | | | | 90918392- | 90923138- | | |
| | | | | 90935407 | 90923157 | | |
| 1359 | 84146 | ZNF644 | intron_09 | chr1: | chr1: | UCCAACUUACACAGUCACAU | + |
| | | | | 90918392- | 90923137- | | |
| | | | | 90935407 | 90923156 | | |
| 1360 | 84146 | ZNF644 | intron_09 | chr1: | chr1: | GCCUAGGAGACCAGCUUCAU | + |
| | | | | 90918392- | 90923112- | | |
| | | | | 90935407 | 90923131 | | |
| 1361 | 84146 | ZNF644 | intron_09 | chr1: | chr1: | UGCCUAGGAGACCAGCUUCA | + |
| | | | | 90918392- | 90923111- | | |
| | | | | 90935407 | 90923130 | | |
| 1362 | 84146 | ZNF644 | intron_09 | chr1: | chr1: | UCUUUCUGUACAAAGUGCCU | + |
| | | | | 90918392- | 90923096- | | |
| | | | | 90935407 | 90923115 | | |
| 1363 | 84146 | ZNF644 | intron_09 | chr1: | chr1: | AACUUUGGCUUCUCAGCAAU | − |
| | | | | 90918392- | 90923054- | | |
| | | | | 90935407 | 90923073 | | |
| 1364 | 84146 | ZNF644 | intron_09 | chr1: | chr1: | GCUUGUGUAAAACAGGAAUG | + |
| | | | | 90918392- | 90923019- | | |
| | | | | 90935407 | 90923038 | | |
| 1365 | 84146 | ZNF644 | intron_09 | chr1: | chr1: | AGCUUGUGUAAAACAGGAAU | + |
| | | | | 90918392- | 90923018- | | |
| | | | | 90935407 | 90923037 | | |
| 1366 | 84146 | ZNF644 | intron_09 | chr1: | chr1: | UAGCUUGUGUAAAACAGGAA | + |
| | | | | 90918392- | 90923017- | | |
| | | | | 90935407 | 90923036 | | |
| 1367 | 84146 | ZNF644 | intron_09 | chr1: | chr1: | CAUGCUAGCUUGUGUAAAAC | + |
| | | | | 90918392- | 90923012- | | |
| | | | | 90935407 | 90923031 | | |
| 1368 | 84146 | ZNF644 | intron_09 | chr1: | chr1: | GCAGUCUUUUUAUAUGCUUG | − |
| | | | | 90918392- | 90922913- | | |
| | | | | 90935407 | 90922932 | | |
| 1369 | 84146 | ZNF644 | intron_09 | chr1: | chr1: | UUGGGGCUUAUGAACCUUGA | − |
| | | | | 90918392- | 90922896- | | |
| | | | | 90935407 | 90922915 | | |
| 1370 | 84146 | ZNF644 | intron_09 | chr1: | chr1: | AGAGGAUGCACACAUGCCAA | + |
| | | | | 90918392- | 90922531- | | |
| | | | | 90935407 | 90922550 | | |
| 1371 | 84146 | ZNF644 | intron_09 | chr1: | chr1: | GCUGGAGGUCGUGCUGGCAG | + |
| | | | | 90918392- | 90922498- | | |
| | | | | 90935407 | 90922517 | | |
| 1372 | 84146 | ZNF644 | intron_09 | chr1: | chr1: | UAUUAAAAAGUUGGUGCUGG | + |
| | | | | 90918392- | 90922483- | | |
| | | | | 90935407 | 90922502 | | |
| 1373 | 84146 | ZNF644 | intron_09 | chr1: | chr1: | GGAAUAAACAUGACACGAAC | + |
| | | | | 90918392- | 90922441- | | |
| | | | | 90935407 | 90922460 | | |
| 1374 | 84146 | ZNF644 | intron_09 | chr1: | chr1: | UUGGCCUGUGUUAAGUUUGG | + |
| | | | | 90918392- | 90922382- | | |
| | | | | 90935407 | 90922401 | | |
| 1375 | 84146 | ZNF644 | intron_09 | chr1: | chr1: | UGGUUGGCCUGUGUUAAGUU | + |
| | | | | 90918392- | 90922379- | | |
| | | | | 90935407 | 90922398 | | |
| 1376 | 84146 | ZNF644 | intron_09 | chr1: | chr1: | AAAUUUUCUUCCCUCUCGUA | − |
| | | | | 90918392- | 90922349- | | |
| | | | | 90935407 | 90922368 | | |
| 1377 | 84146 | ZNF644 | intron_09 | chr1: | chr1: | GCACAGUAUACCCCUACGAG | + |
| | | | | 90918392- | 90922335- | | |
| | | | | 90935407 | 90922354 | | |
| 1378 | 84146 | ZNF644 | intron_09 | chr1: | chr1: | AAUUUUCUUCCCUCUCGUAG | − |
| | | | | 90918392- | 90922348- | | |
| | | | | 90935407 | 90922367 | | |
| 1379 | 84146 | ZNF644 | intron_09 | chr1: | chr1: | GUAUCUAUACCCAAAGUAAG | + |
| | | | | 90918392- | 90922313- | | |
| | | | | 90935407 | 90922332 | | |
| 1380 | 84146 | ZNF644 | intron_09 | chr1: | chr1: | GUAUACUGUGCCUCUUACUU | − |
| | | | | 90918392- | 90922326- | | |
| | | | | 90935407 | 90922345 | | |
| 1381 | 84146 | ZNF644 | intron_09 | chr1: | chr1: | CUAGGACAAAGUGAAACAAC | + |
| | | | | 90918392- | 90922289- | | |
| | | | | 90935407 | 90922308 | | |
| 1382 | 84146 | ZNF644 | intron_09 | chr1: | chr1: | AGACUUUUAAGUUAUUGGGC | − |
| | | | | 90918392- | 90922230- | | |
| | | | | 90935407 | 90922249 | | |
| 1383 | 84146 | ZNF644 | intron_09 | chr1: | chr1: | UACAAAUAAAAAUACUUCGG | − |
| | | | | 90918392- | 90922197- | | |
| | | | | 90935407 | 90922216 | | |
| 1384 | 84146 | ZNF644 | intron_09 | chr1: | chr1: | GGCGAAUGUUAAUUUAGUUA | |
| | | | | 90918392- | 90922176- | | |
| | | | | 90935407 | 90922195 | | |
| 1385 | 84146 | ZNF644 | intron_09 | chr1: | chr1: | UUGGGUCAUUUAUAUCGUGA | − |
| | | | | 90918392- | 90922105- | | |
| | | | | 90935407 | 90922124 | | |
| 1386 | 84146 | ZNF644 | intron_09 | chr1: | chr1: | UUAUUUGCUUUGCACCAAUC | − |
| | | | | 90918392- | 90921912- | | |
| | | | | 90935407 | 90921931 | | |
| 1387 | 84146 | ZNF644 | intron_09 | chr1: | chr1: | GCCAAAGCACUAAACCAGAU | + |
| | | | | 90918392- | 90921895- | | |
| | | | | 90935407 | 90921914 | | |
| 1388 | 84146 | ZNF644 | intron_09 | chr1: | chr1: | ACCAAUCUGGUUUAGUGCUU | − |
| | | | | 90918392- | 90921899- | | |
| | | | | 90935407 | 90921918 | | |
| 1389 | 84146 | ZNF644 | intron_09 | chr1: | chr1: | UUGGCAUGUUGUUGUCGUCA | − |
| | | | | 90918392- | 90921880- | | |
| | | | | 90935407 | 90921899 | | |
| 1390 | 84146 | ZNF644 | intron_09 | chr1: | chr1: | GUUGUUGUCGUCAUGGUCAU | − |
| | | | | 90918392- | 90921873- | | |
| | | | | 90935407 | 90921892 | | |
| 1391 | 84146 | ZNF644 | intron_09 | chr1: | chr1: | GUAUUCAUAGCAUAGCAGUG | − |
| | | | | 90918392- | 90921845- | | |
| | | | | 90935407 | 90921864 | | |
| 1392 | 84146 | ZNF644 | intron_09 | chr1: | chr1: | GGAGAAUAAAUUGAGCUGUA | + |
| | | | | 90918392- | 90921709- | | |
| | | | | 90935407 | 90921728 | | |
| 1393 | 84146 | ZNF644 | intron_09 | chr1: | chr1: | UCCUAAGAUUACUAUUCGGU | + |
| | | | | 90918392- | 90921583- | | |
| | | | | 90935407 | 90921602 | | |
| 1394 | 84146 | ZNF644 | intron_09 | chr1: | chr1: | UUCCUAAGAUUACUAUUCGG | + |
| | | | | 90918392- | 90921582- | | |
| | | | | 90935407 | 90921601 | | |
| 1395 | 84146 | ZNF644 | intron_09 | chr1: | chr1: | ACCUUCCUAAGAUUACUAUU | + |
| | | | | 90918392- | 90921579- | | |
| | | | | 90935407 | 90921598 | | |
| 1396 | 84146 | ZNF644 | intron_09 | chr1: | chr1: | GCCCACCGAAUAGUAAUCUU | − |
| | | | | 90918392- | 90921587- | | |
| | | | | 90935407 | 90921606 | | |
| 1397 | 84146 | ZNF644 | intron_09 | chr1: | chr1: | ACCGAAUAGUAAUCUUAGGA | − |
| | | | | 90918392- | 90921583- | | |
| | | | | 90935407 | 90921602 | | |
| 1398 | 84146 | ZNF644 | intron_09 | chr1: | chr1: | UUAGUGACCAAAAAACUCCA | + |
| | | | | 90918392- | 90921394- | | |
| | | | | 90935407 | 90921413 | | |
| 1399 | 84146 | ZNF644 | intron_09 | chr1: | chr1: | UUGUGUAACAGUUAUCUAUU | − |
| | | | | 90918392- | 90921339- | | |
| | | | | 90935407 | 90921358 | | |
| 1400 | 84146 | ZNF644 | intron_09 | chr1: | chr1: | GUUUUGUUCUGGACUGUACC | + |
| | | | | 90918392- | 90921196- | | |
| | | | | 90935407 | 90921215 | | |
| 1401 | 84146 | ZNF644 | intron_09 | chr1: | chr1: | UAUAGGAUCCUCUACAUAAA | + |
| | | | | 90918392- | 90921066- | | |
| | | | | 90935407 | 90921085 | | |
| 1402 | 84146 | ZNF644 | intron_09 | chr1: | chr1: | UAUUAAAACUGCACAAAAAG | + |
| | | | | 90918392- | 90921036- | | |
| | | | | 90935407 | 90921055 | | |
| 1403 | 84146 | ZNF644 | intron_09 | chr1: | chr1: | GUGAUACUGCCCAUACCUUU | + |
| | | | | 90918392- | 90920984- | | |
| | | | | 90935407 | 90921003 | | |
| 1404 | 84146 | ZNF644 | intron_09 | chr1: | chr1: | AACAGAUUUUCCCAAAGGUA | − |
| | | | | 90918392- | 90920997- | | |
| | | | | 90935407 | 90921016 | | |
| 1405 | 84146 | ZNF644 | intron_09 | chr1: | chr1: | UGUGAUACUGCCCAUACCUU | + |
| | | | | 90918392- | 90920983- | | |
| | | | | 90935407 | 90921002 | | |
| 1406 | 84146 | ZNF644 | intron_09 | chr1: | chr1: | AUGGGCAGUAUCACAGGAGU | − |
| | | | | 90918392- | 90920978- | | |
| | | | | 90935407 | 90920997 | | |
| 1407 | 84146 | ZNF644 | intron_09 | chr1: | chr1: | UAUUAAAAAUCUGGGAACUU | + |
| | | | | 90918392- | 90920817- | | |
| | | | | 90935407 | 90920836 | | |
| 1408 | 84146 | ZNF644 | intron_09 | chr1: | chr1: | AACCCAGGGCUCCAAAGUUA | + |
| | | | | 90918392- | 90920741- | | |
| | | | | 90935407 | 90920760 | | |
| 1409 | 84146 | ZNF644 | intron_09 | chr1: | chr1: | AGAUUCUGUAACCUUAACUU | − |
| | | | | 90918392- | 90920755- | | |
| | | | | 90935407 | 90920774 | | |
| 1410 | 84146 | ZNF644 | intron_09 | chr1: | chr1: | UAACCUUAACUUUGGAGCCC | − |
| | | | | 90918392- | 90920747- | | |
| | | | | 90935407 | 90920766 | | |
| 1411 | 84146 | ZNF644 | intron_09 | chr1: | chr1: | AUGAUUGAUCAGUCAUAAGC | − |
| | | | | 90918392- | 90920715- | | |
| | | | | 90935407 | 90920734 | | |
| 1412 | 84146 | ZNF644 | intron_09 | chr1: | chr1: | ACUCAUUGCUACAAAAAUGA | − |
| | | | | 90918392- | 90920652- | | |
| | | | | 90935407 | 90920671 | | |
| 1413 | 84146 | ZNF644 | intron_09 | chr1: | chr1: | CUGUGGAAACUCUUAAGUUU | + |
| | | | | 90918392- | 90920585- | | |
| | | | | 90935407 | 90920604 | | |
| 1414 | 84146 | ZNF644 | intron_09 | chr1: | chr1: | UUUUGAUGCUUUAUGGACUG | + |
| | | | | 90918392- | 90920568- | | |
| | | | | 90935407 | 90920587 | | |
| 1415 | 84146 | ZNF644 | intron_09 | chr1: | chr1: | UUAUGGCUUUUGAUGCUUUA | + |
| | | | | 90918392- | 90920561- | | |
| | | | | 90935407 | 90920580 | | |
| 1416 | 84146 | ZNF644 | intron_09 | chr1: | chr1: | UCACAGAAUGUUAAUGUUAG | + |
| | | | | 90918392- | 90920354- | | |
| | | | | 90935407 | 90920373 | | |
| 1417 | 84146 | ZNF644 | intron_09 | chr1: | chr1: | UCUUACUUUGAUGAGCUUGC | + |
| | | | | 90918392- | 90920231- | | |
| | | | | 90935407 | 90920250 | | |
| 1418 | 84146 | ZNF644 | intron_09 | chr1: | chr1: | UUGGUGUAUCAUAAGAUUAC | + |
| | | | | 90918392- | 90920203- | | |
| | | | | 90935407 | 90920222 | | |
| 1419 | 84146 | ZNF644 | intron_09 | chr1: | chr1: | UGUGUUAGGCAGAAUAGAGC | + |
| | | | | 90918392- | 90920177- | | |
| | | | | 90935407 | 90920196 | | |
| 1420 | 84146 | ZNF644 | intron_09 | chr1: | chr1: | CAAGGAUCCAUCUUUACAGA | − |
| | | | | 90918392- | 90920155- | | |
| | | | | 90935407 | 90920174 | | |
| 1421 | 84146 | ZNF644 | intron_09 | chr1: | chr1: | UACACUAGAAAUAGAGUUCA | + |
| | | | | 90918392- | 90920089- | | |
| | | | | 90935407 | 90920108 | | |
| 1422 | 84146 | ZNF644 | intron_09 | chr1: | chr1: | AUACACUAGAAAUAGAGUUC | + |
| | | | | 90918392- | 90920088- | | |
| | | | | 90935407 | 90920107 | | |
| 1423 | 84146 | ZNF644 | intron_09 | chr1: | chr1: | GAUUGCUCACCAAAGCGAUU | − |
| | | | | 90918392- | 90920041- | | |
| | | | | 90935407 | 90920060 | | |
| 1424 | 84146 | ZNF644 | intron_09 | chr1: | chr1: | CACCAAAGCGAUUAGGAAAA | − |
| | | | | 90918392- | 90920034- | | |
| | | | | 90935407 | 90920053 | | |
| 1425 | 84146 | ZNF644 | intron_09 | chr1: | chr1: | CCUUAUGCUUUGUACCCAGU | + |
| | | | | 90918392- | 90920003- | | |
| | | | | 90935407 | 90920022 | | |
| 1426 | 84146 | ZNF644 | intron_09 | chr1: | chr1: | CCUACUGGGUACAAAGCAUA | − |
| | | | | 90918392- | 90920006- | | |
| | | | | 90935407 | 90920025 | | |
| 1427 | 84146 | ZNF644 | intron_09 | chr1: | chr1: | CCUAGUUUCUGUACAUAAGC | − |
| | | | | 90918392- | 90919954- | | |
| | | | | 90935407 | 90919973 | | |
| 1428 | 84146 | ZNF644 | intron_09 | chr1: | chr1: | GUUUCUGUACAUAAGCUGGC | − |
| | | | | 90918392- | 90919950- | | |
| | | | | 90935407 | 90919969 | | |
| 1429 | 84146 | ZNF644 | intron_09 | chr1: | chr1: | CUGGUCAGUGAUUUAUAUCU | − |
| | | | | 90918392- | 90919931- | | |
| | | | | 90935407 | 90919950 | | |
| 1430 | 84146 | ZNF644 | intron_09 | chr1: | chr1: | AAUGAUGCACAAUGUUGUAC | − |
| | | | | 90918392- | 90919869- | | |
| | | | | 90935407 | 90919888 | | |
| 1431 | 84146 | ZNF644 | intron_09 | chr1: | chr1: | GUUUUACUCCUAUUUAAUAC | + |
| | | | | 90918392- | 90919836- | | |
| | | | | 90935407 | 90919855 | | |
| 1432 | 84146 | ZNF644 | intron_09 | chr1: | chr1: | GAACUACUAGAAGUCAAGUU | + |
| | | | | 90918392- | 90919624- | | |
| | | | | 90935407 | 90919643 | | |
| 1433 | 84146 | ZNF644 | intron_09 | chr1: | chr1: | CUUUUGAAUAGGCAGGUGAC | − |
| | | | | 90918392- | 90919545- | | |
| | | | | 90935407 | 90919564 | | |
| 1434 | 84146 | ZNF644 | intron_09 | chr1: | chr1: | CAGUGGCUUCAAUGAGAUUU | − |
| | | | | 90918392- | 90919512- | | |
| | | | | 90935407 | 90919531 | | |
| 1435 | 84146 | ZNF644 | intron_09 | chr1: | chr1: | GACUAAGGAACUAUGUUUAC | − |
| | | | | 90918392- | 90919437- | | |
| | | | | 90935407 | 90919456 | | |
| 1436 | 84146 | ZNF644 | intron_09 | chr1: | chr1: | UGUAGGGAUCCAAGGGGGGA | + |
| | | | | 90918392- | 90919238- | | |
| | | | | 90935407 | 90919257 | | |
| 1437 | 84146 | ZNF644 | intron_09 | chr1: | chr1: | CAUUUGUAUCCCUCCCCCCU | − |
| | | | | 90918392- | 90919250- | | |
| | | | | 90935407 | 90919269 | | |
| 1438 | 84146 | ZNF644 | intron_09 | chr1: | chr1: | UUAUCUGUAGGGAUCCAAGG | + |
| | | | | 90918392- | 90919233- | | |
| | | | | 90935407 | 90919252 | | |
| 1439 | 84146 | ZNF644 | intron_09 | chr1: | chr1: | AAUUUAUCUGUAGGGAUCCA | + |
| | | | | 90918392- | 90919230- | | |
| | | | | 90935407 | 90919249 | | |
| 1440 | 84146 | ZNF644 | intron_09 | chr1: | chr1: | AAGGUAAGAAUUUAUCUGUA | + |
| | | | | 90918392- | 90919222- | | |
| | | | | 90935407 | 90919241 | | |
| 1441 | 84146 | ZNF644 | intron_09 | chr1: | chr1: | GGUCAAUUAGCAGGAAGAGA | + |
| | | | | 90918392- | 90919203- | | |
| | | | | 90935407 | 90919222 | | |
| 1442 | 84146 | ZNF644 | intron_09 | chr1: | chr1: | CUAAUUGACCAGCAGCACCC | |
| | | | | 90918392- | 90919193- | | |
| | | | | 90935407 | 90919212 | | |
| 1443 | 84146 | ZNF644 | intron_09 | chr1: | chr1: | AAAGGGAUGAUAGCAAUCCA | + |
| | | | | 90918392- | 90919173- | | |
| | | | | 90935407 | 90919192 | | |
| 1444 | 84146 | ZNF644 | intron_09 | chr1: | chr1: | GAUAGCACAUAACAUUUUAU | + |
| | | | | 90918392- | 90919118- | | |
| | | | | 90935407 | 90919137 | | |
| 1445 | 84146 | ZNF644 | intron_09 | chr1: | chr1: | GGUUGUUUUAGAAUAAAUAA | − |
| | | | | 90918392- | 90919055- | | |
| | | | | 90935407 | 90919074 | | |
| 1446 | 84146 | ZNF644 | intron_09 | chr1: | chr1: | AUCUCACGUAAGUUUACAAU | + |
| | | | | 90918392- | 90918870- | | |
| | | | | 90935407 | 90918889 | | |
| 1447 | 84146 | ZNF644 | intron_09 | chr1: | chr1: | UAAACUUACGUGAGAUAAUA | − |
| | | | | 90918392- | 90918866- | | |
| | | | | 90935407 | 90918885 | | |
| 1448 | 84146 | ZNF644 | intron_09 | chr1: | chr1: | UAGCUCUUAAAAUUGUAUGC | + |
| | | | | 90918392- | 90918719- | | |
| | | | | 90935407 | 90918738 | | |
| 1449 | 84146 | ZNF644 | intron_09 | chr1: | chr1: | GAAAACUUCGUAAGGGAAUA | + |
| | | | | 90918392- | 90918629- | | |
| | | | | 90935407 | 90918648 | | |
| 1450 | 84146 | ZNF644 | intron_09 | chr1: | chr1: | AUACUUGGAAAACUUCGUAA | + |
| | | | | 90918392- | 90918622- | | |
| | | | | 90935407 | 90918641 | | |
| 1451 | 84146 | ZNF644 | intron_09 | chr1: | chr1: | UAUACUUGGAAAACUUCGUA | + |
| | | | | 90918392- | 90918621- | | |
| | | | | 90935407 | 90918640 | | |
| 1452 | 84146 | ZNF644 | intron_09 | chr1: | chr1: | AGUAUAGAAGACCUACUUAA | − |
| | | | | 90918392- | 90918607- | | |
| | | | | 90935407 | 90918626 | | |
| 1453 | 84146 | ZNF644 | intron_09 | chr1: | chr1: | UUCUCAGUUCUAGUUUGGUG | − |
| | | | | 90918392- | 90918417- | | |
| | | | | 90935407 | 90918436 | | |
| 1454 | 84146 | ZNF644 | exon_10_nc.1 | chr1: | chr1: | AUUAUUUGAAAAGGCAGUAU | − |
| | | | | 90918155- | 90918388- | | |
| | | | | 90918391 | 90918407 | | |
| 1455 | 84146 | ZNF644 | exon_10_nc.1 | chr1: | chr1: | AUAUUAUCUGUACUGUACAG | + |
| | | | | 90918155- | 90918327- | | |
| | | | | 90918391 | 90918346 | | |
| 1456 | 84146 | ZNF644 | exon_10_nc.1 | chr1: | chr1: | CUUACAAUCUAAGGCUAAAA | + |
| | | | | 90918155- | 90918141- | | |
| | | | | 90918391 | 90918160 | | |
| 1457 | 84146 | ZNF644 | exon_10_c.1/ | chr1: | chr1: | UAAACCUCGUCAGCACCAUG | + |
| | | | nc.2 | 90918052- | 90918067- | | |
| | | | | 90918154 | 90918086 | | |
| 1458 | 84146 | ZNF644 | intron_10 | chr1: | chr1: | GUCUUGAGUUCUCGCUUAUU | − |
| | | | | 90916991- | 90917416- | | |
| | | | | 90918051 | 90917435 | | |
| 1459 | 84146 | ZNF644 | intron_10 | chr1: | chr1: | GAAGAAGGCGUGACUAUGAG | + |
| | | | | 90916991- | 90917376- | | |
| | | | | 90918051 | 90917395 | | |
| 1460 | 84146 | ZNF644 | intron_10 | chr1: | chr1: | CCAGUUUAGCAUUCCUUAAA | + |
| | | | | 90916991- | 90917305- | | |
| | | | | 90918051 | 90917324 | | |
| 1461 | 84146 | ZNF644 | intron_10 | chr1: | chr1: | CCAUUUAAGGAAUGCUAAAC | − |
| | | | | 90916991- | 90917308- | | |
| | | | | 90918051 | 90917327 | | |
| 1462 | 84146 | ZNF644 | intron_10 | chr1: | chr1: | AAGGAAUGCUAAACUGGGGA | − |
| | | | | 90916991- | 90917302- | | |
| | | | | 90918051 | 90917321 | | |
| 1463 | 84146 | ZNF644 | intron_10 | chr1: | chr1: | CCAGUAAUCUUUGUAUAGGU | + |
| | | | | 90916991- | 90917185- | | |
| | | | | 90918051 | 90917204 | | |
| 1464 | 84146 | ZNF644 | intron_10 | chr1: | chr1: | AACUCCAGUAAUCUUUGUAU | + |
| | | | | 90916991- | 90917181- | | |
| | | | | 90918051 | 90917200 | | |
| 1465 | 84146 | ZNF644 | intron_10 | chr1: | chr1: | CCCACCUAUACAAAGAUUAC | − |
| | | | | 90916991- | 90917188- | | |
| | | | | 90918051 | 90917207 | | |
| 1466 | 84146 | ZNF644 | exon_11_c.1/ | chr1: | chr1: | ACAAGGGUCCUCGAAAGACU | + |
| | | | nc.1 | 90916801- | 90916959- | | |
| | | | | 90916990 | 90916978 | | |
| 1467 | 84146 | ZNF644 | exon_11_c.1/ | chr1: | chr1: | UUUUGUGGCCUAGUCUUUCG | − |
| | | | nc.1 | 90916801- | 90916970- | | |
| | | | | 90916990 | 90916989 | | |
| 1468 | 84146 | ZNF644 | exon_11_c.1/ | chr1: | chr1: | CCAGUCUUCCUGAACAGACA | + |
| | | | nc.1 | 90916801- | 90916942- | | |
| | | | | 90916990 | 90916961 | | |
| 1469 | 84146 | ZNF644 | exon_11_c.1/ | chr1: | chr1: | UCGAGGACCCUUGUCUGUUC | − |
| | | | nc.1 | 90916801- | 90916953- | | |
| | | | | 90916990 | 90916972 | | |
| 1470 | 84146 | ZNF644 | exon_11_c.1/ | chr1: | chr1: | UUGUAAACGCUAAUCUUCCA | − |
| | | | nc.1 | 90916801- | 90916900- | | |
| | | | | 90916990 | 90916919 | | |
| 1471 | 84146 | ZNF644 | exon_11_c.1/ | chr1: | chr1: | AACGCUAAUCUUCCACGGAC | − |
| | | | nc.1 | 90916801- | 90916895- | | |
| | | | | 90916990 | 90916914 | | |
| 1472 | 84146 | ZNF644 | exon_11_c.1/ | chr1: | chr1: | AAUCUUCCACGGACUGGAGC | − |
| | | | nc.1 | 90916801- | 90916889- | | |
| | | | | 90916990 | 90916908 | | |
| 1473 | 84146 | ZNF644 | exon_11_nc.2 | chr1: | chr1: | CGAAGCAGCUUCAUAGAACC | − |
| | | | | 90916791- | 90916794- | | |
| | | | | 90916800 | 90916813 | | |
| 1474 | 84146 | ZNF644 | exon_11_nc.3 | chr1: | chr1: | AUUCAAACUGGCUAUUUAAA | + |
| | | | | 90916490- | 90916765- | | |
| | | | | 90916790 | 90916784 | | |
| 1475 | 84146 | ZNF644 | exon_11_nc.3 | chr1: | chr1: | UAUAAACAGAUAAUUUAAUG | + |
| | | | | 90916490- | 90916710- | | |
| | | | | 90916790 | 90916729 | | |
| 1476 | 84146 | ZNF644 | exon_11_nc.3 | chr1: | chr1: | CUGUUUAUAAAUACUAAAGC | − |
| | | | | 90916490- | 90916699- | | |
| | | | | 90916790 | 90916718 | | |
| 1477 | 84146 | ZNF644 | exon_11_nc.3 | chr1: | chr1: | AUACUAAAGCAGGAAAAUGG | − |
| | | | | 90916490- | 90916689- | | |
| | | | | 90916790 | 90916708 | | |
| 1478 | 84146 | ZNF644 | exon_11_nc.3 | chr1: | chr1: | CAUUAAUAAACUGUUGCACA | − |
| | | | | 90916490- | 90916511- | | |
| | | | | 90916790 | 90916530 | | |
| 1479 | 84146 | ZNF644 | exon_11_nc.4 | chr1: | chr1: | UUUUCUAUGCAAGUCUUGUG | + |
| | | | | 90916390- | 90916415- | | |
| | | | | 90916489 | 90916434 | | |
| 1480 | 84146 | ZNF644 | exon_11_nc.5 | chr1: | chr1: | UAAAUUUAGUCAGCGGUUCU | + |
| | | | | 90916185- | 90916345- | | |
| | | | | 90916389 | 90916364 | | |
| 1481 | 84146 | ZNF644 | exon_11_nc.5 | chr1: | chr1: | UGACUAAAUUUACUCAAAUU | − |
| | | | | 90916185- | 90916337- | | |
| | | | | 90916389 | 90916356 | | |
| 1482 | 84146 | ZNF644 | exon_11_nc.5 | chr1: | chr1: | UGAGACUGUUCACUCAAAUA | − |
| | | | | 90916185- | 90916287- | | |
| | | | | 90916389 | 90916306 | | |
| 1483 | 84146 | ZNF644 | exon_11_nc.6 | chr1: | chr1: | AUCUUUGUUGACAAAGUAGG | + |
| | | | | 90915306- | 90916056- | | |
| | | | | 90916184 | 90916075 | | |
| 1484 | 84146 | ZNF644 | exon_11_nc.6 | chr1: | chr1: | AGCAUCUUUGUUGACAAAGU | + |
| | | | | 90915306- | 90916053- | | |
| | | | | 90916184 | 90916072 | | |
| 1485 | 84146 | ZNF644 | exon_11_nc.6 | chr1: | chr1: | AUUUGACAUGCUUACAGGAC | − |
| | | | | 90915306- | 90915924- | | |
| | | | | 90916184 | 90915943 | | |
| 1486 | 84146 | ZNF644 | exon_11_nc.6 | chr1: | chr1: | CCAUACUACAUGAAAUAAAA | + |
| | | | | 90915306- | 90915490- | | |
| | | | | 90916184 | 90915509 | | |
| 1487 | 84146 | ZNF644 | exon_11_nc.6 | chr1: | chr1: | CUAAUACUAUAGUUGAACCA | − |
| | | | | 90915306- | 90915470- | | |
| | | | | 90916184 | 90915489 | | |
| 1488 | 84146 | ZNF644 | exon_11_nc.6 | chr1: | chr1: | CUGGUAAGGAGAUAUACCAU | + |
| | | | | 90915306- | 90915338- | | |
| | | | | 90916184 | 90915357 | | |

TABLE 2

| | target | target_ | target_region_ | target_region_ | gRNA_target_ | | |
|---|---|---|---|---|---|---|---|
| SEQ ID NO | gene_id | symbol | name | coordinates | site_coordinates | gRNA Targeting Domain | strand |
| 1489 | 84146 | ZNF644 | promoter1.2 | chr1: 91022273-91023899 | chr1: 91023879-91023898 | CUCUGUCUAGCCGCAGACGU | + |
| 1490 | 84146 | ZNF644 | promoter1.2 | chr1: 91022273-91023899 | chr1: 91023790-91023809 | AUCUCAAAAGCUUCUAUGAA | + |
| 1491 | 84146 | ZNF644 | promoter1.2 | chr1: 91022273-91023899 | chr1: 91023686-91023705 | GCAACUGAAUUGUAAUACUG | + |
| 1492 | 84146 | ZNF644 | promoter1.2 | chr1: 91022273-91023899 | chr1: 91023621-91023640 | UUCAGAACUCAGCCAUGAUC | + |
| 1493 | 84146 | ZNF644 | promoter1.2 | chr1: 91022273-91023899 | chr1: 91023456-91023475 | CUGAGAAUGUCCAAUUUUAA | − |
| 1494 | 84146 | ZNF644 | promoter1.2 | chr1: 91022273-91023899 | chr1: 91023401-91023420 | AUUUGCAGUCAAUGGGGGAG | + |
| 1495 | 84146 | ZNF644 | promoter1.2 | chr1: 91022273-91023899 | chr1: 91023396-91023415 | UAUAUAUUUGCAGUCAAUGG | + |
| 1496 | 84146 | ZNF644 | promoter1.2 | chr1: 91022273-91023899 | chr1: 91023353-91023372 | ACAUUUGUGUAAAUGAAGAC | − |
| 1497 | 84146 | ZNF644 | promoter1.2 | chr1: 91022273-91023899 | chr1: 91023307-91023326 | CUCGAAGUCAUACAGUUCUU | + |
| 1498 | 84146 | ZNF644 | promoter1.2 | chr1: 91022273-91023899 | chr1: 91023277-91023296 | CAAUGAGACAAAGAGGAGUA | + |
| 1499 | 84146 | ZNF644 | promoter1.2 | chr1: 91022273-91023899 | chr1: 91023279-91023298 | CUUACUCCUCUUUGUCUCAU | − |
| 1500 | 84146 | ZNF644 | promoter1.2 | chr1: 91022273-91023899 | chr1: 91023278-91023297 | UUACUCCUCUUUGUCUCAUU | − |
| 1501 | 84146 | ZNF644 | promoter1.2 | chr1: 91022273-91023899 | chr1: 91023164-91023183 | UUAGUCAAAUAUUUGUUGUU | − |
| 1502 | 84146 | ZNF644 | promoter1.2 | chr1: 91022273-91023899 | chr1: 91023139-91023158 | UCUACGUUUGCUGUUGCUGA | − |
| 1503 | 84146 | ZNF644 | promoter1.2 | chr1: 91022273-91023899 | chr1: 91023047-91023066 | CUCAAGAUGUUAUUGACAUU | + |
| 1504 | 84146 | ZNF644 | promoter1.2 | chr1: 91022273-91023899 | chr1: 91023040-91023059 | AUAACAUCUUGAGGGUUUGG | − |
| 1505 | 84146 | ZNF644 | promoter1.2 | chr1: 91022273-91023899 | chr1: 91023010-91023029 | UAAUGACAGCUGUACAACUA | − |
| 1506 | 84146 | ZNF644 | promoter1.2 | chr1: 91022273-91023899 | chr1: 91022913-91022932 | AGAGUUCUUGAGAAAUCUAC | + |
| 1507 | 84146 | ZNF644 | promoter1.2 | chr1: 91022273-91023899 | chr1: 91022830-91022849 | ACUCAGUGUUUCUCUGCCCC | − |
| 1508 | 84146 | ZNF644 | promoter1.2 | chr1: 91022273-91023899 | chr1: 91022809-91022828 | AAGACUUCACCACAGGAUCC | + |
| 1509 | 84146 | ZNF644 | promoter1.2 | chr1: 91022273-91023899 | chr1: 91022802-91022821 | UUUUAACAAGACUUCACCAC | + |
| 1510 | 84146 | ZNF644 | promoter1.2 | chr1: 91022273-91023899 | chr1: 91022779-91022798 | AAAAUUUCCAGAACCCUCUA | − |
| 1511 | 84146 | ZNF644 | promoter1.2 | chr1: 91022273-91023899 | chr1: 91022732-91022751 | AUAAGAAGCAUGUGAGAUGC | + |
| 1512 | 84146 | ZNF644 | promoter1.2 | chr1: 91022273-91023899 | chr1: 91022690-91022709 | CUGCAUUACUGAAAGUGUCG | + |
| 1513 | 84146 | ZNF644 | promoter1.2 | chr1: 91022273-91023899 | chr1: 91022656-91022675 | UGCUCCAGUUUGACUCUCUG | + |
| 1514 | 84146 | ZNF644 | promoter1.2 | chr1: 91022273-91023899 | chr1: 91022639-91022658 | GCAAACCUCGGCCACCUUUC | − |
| 1515 | 84146 | ZNF644 | promoter1.2 | chr1: 91022273-91023899 | chr1: 91022638-91022657 | CAAACCUCGGCCACCUUUCA | − |
| 1516 | 84146 | ZNF644 | promoter1.2 | chr1: 91022273-91023899 | chr1: 91022592-91022611 | GUCACACUUGAUGCUUUGCC | − |
| 1517 | 84146 | ZNF644 | promoter1.2 | chr1: 91022273-91023899 | chr1: 91022517-91022536 | CAACUGUGGAGUAAUGGCAG | + |
| 1518 | 84146 | ZNF644 | promoter1.2 | chr1: 91022273-91023899 | chr1: 91022503-91022522 | AUAUUUGCCAAUCACAACUG | + |
| 1519 | 84146 | ZNF644 | promoter1.2 | chr1: 91022273-91023899 | chr1: 91022435-91022454 | GUGAUCGUGGAACUCAAACC | − |
| 1520 | 84146 | ZNF644 | promoter1.2 | chr1: 91022273-91023899 | chr1: 91022434-91022453 | UGAUCGUGGAACUCAAACCU | − |
| 1521 | 84146 | ZNF644 | promoter1.2 | chr1: 91022273-91023899 | chr1: 91022389-91022408 | CCCAAGCACUAGGCAUGCCU | + |
| 1522 | 84146 | ZNF644 | promoter1.2 | chr1: 91022273-91023899 | chr1: 91022393-91022412 | GCCUAGGCAUGCCUAGUGCU | − |
| 1523 | 84146 | ZNF644 | promoter1.2 | chr1: 91022273-91023899 | chr1: 91022392-91022411 | CCUAGGCAUGCCUAGUGCUU | − |
| 1524 | 84146 | ZNF644 | promoter1.2 | chr1: 91022273-91023899 | chr1: 91022376-91022395 | GCUUGGGUCUUGCAGAGUUU | − |
| 1525 | 84146 | ZNF644 | promoter1.2 | chr1: 91022273-91023899 | chr1: 91022361-91022380 | AGUUUGGGCACCACCAUAUU | − |
| 1526 | 84146 | ZNF644 | promoter1.2 | chr1: 91022273-91023899 | chr1: 91022311-91022330 | UGACCUAAUCACUCCCAAGG | + |
| 1527 | 84146 | ZNF644 | promoter1.2 | chr1: 91022273-91023899 | chr1: 91022305-91022324 | GAGUGAUUAGGUCAGCGCUG | − |
| 1528 | 84146 | ZNF644 | promoter1.2 | chr1: 91022273-91023899 | chr1: 91022304-91022323 | AGUGAUUAGGUCAGCGCUGG | − |
| 1529 | 84146 | ZNF644 | promoter1.2 | chr1: 91022273-91023899 | chr1: 91022301-91022320 | GAUUAGGUCAGCGCUGGGGG | − |
| 1530 | 84146 | ZNF644 | exon_01_nc.1 | chr1: 91022256-91022272 | chr1: 91022253-91022272 | AACAGUGCACCACUGUUCUC | + |
| 1531 | 84146 | ZNF644 | exon_01_nc.2 | chr1: 91022082-91022255 | chr1: 91022230-91022249 | GCUGCCCUCGUUUGUCUAAU | − |
| 1532 | 84146 | ZNF644 | exon_01_nc.2 | chr1: 91022082-91022255 | chr1: 91022172-91022191 | CUCCUCGCUGGCCACCCCCG | − |
| 1533 | 84146 | ZNF644 | exon_01_nc.2 | chr1: 91022082-91022255 | chr1: 91022145-91022164 | UUCCCGCCUCUGCCGGGCUG | + |
| 1534 | 84146 | ZNF644 | exon_01_nc.2 | chr1: 91022082-91022255 | chr1: 91022151-91022170 | GGCCCGCAGCCCGGCAGAGG | − |
| 1535 | 84146 | ZNF644 | exon_01_nc.2 | chr1: 91022082-91022255 | chr1: 91022127-91022146 | AAAGCAGCGCGCCUGCGCCG | + |
| 1536 | 84146 | ZNF644 | exon_01_nc.2 | chr1: 91022082-91022255 | chr1: 91022113-91022132 | AGCCCCGGUUCCCACGGCGC | + |
| 1537 | 84146 | ZNF644 | exon_01_nc.2 | chr1: 91022082-91022255 | chr1: 91022126-91022145 | AAGCAGCGCGCCUGCGCCGU | − |
| 1538 | 84146 | ZNF644 | exon_01_nc.2 | chr1: 91022082-91022255 | chr1: 91022114-91022133 | UGCGCCGUGGGAACCGGGGC | + |
| 1539 | 84146 | ZNF644 | exon_01_nc.2 | chr1: 91022082-91022255 | chr1: 91022098-91022117 | CCGCUUUUCGCCUCCAGCCC | + |
| 1540 | 84146 | ZNF644 | exon_01_nc.2 | chr1: 91022082-91022255 | chr1: 91022111-91022130 | GCCGUGGGAACCGGGGCUGG | − |
| 1541 | 84146 | ZNF644 | exon_01_nc.2 | chr1: 91022082-91022255 | chr1: 91022101-91022120 | CCGGGGCUGGAGGCGAAAAG | − |
| 1542 | 84146 | ZNF644 | exon_01_nc.2 | chr1: 91022082-91022255 | chr1: 91022094-91022113 | UGGAGGCGAAAAGCGGGGAG | − |
| 1543 | 84146 | ZNF644 | exon_01_nc.2 | chr1: 91022082-91022255 | chr1: 91022091-91022110 | AGGCGAAAAGCGGGGAGCGG | − |
| 1544 | 84146 | ZNF644 | exon_01_nc.2 | chr1: 91022082-91022255 | chr1: 91022090-91022109 | GGCGAAAAGCGGGGAGCGGA | − |
| 1545 | 84146 | ZNF644 | exon_01_nc.2 | chr1: 91022082-91022255 | chr1: 91022089-91022108 | GCGAAAAGCGGGGAGCGGAG | − |
| 1546 | 84146 | ZNF644 | exon_01_nc.2 | chr1: 91022082-91022255 | chr1: 91022088-91022107 | CGAAAAGCGGGGAGCGGAGG | − |
| 1547 | 84146 | ZNF644 | exon_01_nc.4 | chr1: 91022036-91022055 | chr1: 91022046-91022065 | GUACAGAGCGGCGUGUGACG | − |
| 1548 | 84146 | ZNF644 | exon_01_nc.5 | chr1: 91022015-91022035 | chr1: 91022015-91022034 | GGGGCGACGUUGGGAGCACG | + |
| 1549 | 84146 | ZNF644 | intron_01 | chr1: 91021726-91021989 | chr1: 91021980-91021999 | GCACCAAACUGUGAGUUUCA | − |
| 1550 | 84146 | ZNF644 | intron_01 | chr1: 91021726-91021989 | chr1: 91021947-91021966 | CAGAUUCGCUGGGACCCGAG | − |
| 1551 | 84146 | ZNF644 | intron_01 | chr1: 91021726-91021989 | chr1: 91021930-91021949 | CAGAGGCCCGAAACCCACUC | + |
| 1552 | 84146 | ZNF644 | intron_01 | chr1: 91021726-91021989 | chr1: 91021940-91021959 | GCUGGGACCCGAGUGGGUUU | − |
| 1553 | 84146 | ZNF644 | intron_01 | chr1: 91021726-91021989 | chr1: 91021907-91021926 | UGUGGCAGCGGCGGGACUGA | − |
| 1554 | 84146 | ZNF644 | intron_01 | chr1: 91021726-91021989 | chr1: 91021888-91021907 | AGGGUGGCGGAAGAACUUGG | − |
| 1555 | 84146 | ZNF644 | intron_01 | chr1: 91021726-91021989 | chr1: 91021882-91021901 | GCGGAAGAACUUGGGGGACC | − |
| 1556 | 84146 | ZNF644 | intron_01 | chr1: 91021726-91021989 | chr1: 91021856-91021875 | UCCCCGGGCCCGAGAGCCGG | + |
| 1557 | 84146 | ZNF644 | intron_01 | chr1: 91021726-91021989 | chr1: 91021868-91021887 | GGGACCCGGCCUCCGGCUCU | − |
| 1558 | 84146 | ZNF644 | intron_01 | chr1: 91021726-91021989 | chr1: 91021867-91021886 | GGACCCGGCCUCCGGCUCUC | − |
| 1559 | 84146 | ZNF644 | intron_01 | chr1: 91021726-91021989 | chr1: 91021862-91021881 | CGGCCUCCGGCUCUCGGGCC | − |
| 1560 | 84146 | ZNF644 | intron_01 | chr1: 91021726-91021989 | chr1: 91021841-91021860 | AGCCUAGGGCGUAGCUCCCC | + |
| 1561 | 84146 | ZNF644 | intron_01 | chr1: 91021726-91021989 | chr1: 91021840-91021859 | CAGCCUAGGGCGUAGCUCCC | + |
| 1562 | 84146 | ZNF644 | intron_01 | chr1: 91021726-91021989 | chr1: 91021846-91021865 | GGCCCGGGGAGCUACGCCCU | − |
| 1563 | 84146 | ZNF644 | intron_01 | chr1: 91021726-91021989 | chr1: 91021827-91021846 | GAUGGCUGGGACCCAGCCUA | + |
| 1564 | 84146 | ZNF644 | intron_01 | chr1: 91021726-91021989 | chr1: 91021787-91021806 | CGCCGCCAUCUUAGCCUGUG | + |
| 1565 | 84146 | ZNF644 | intron_01 | chr1: 91021726-91021989 | chr1: 91021786-91021805 | ACAGGCUAAGAUGGCGGCGG | − |
| 1566 | 84146 | ZNF644 | intron_01 | chr1: 91021726-91021989 | chr1: 91021749-91021768 | UUGGUGCUACACAAGGAGCC | − |
| 1567 | 84146 | ZNF644 | intron_01 | chr1: 91021726-91021989 | chr1: 91021748-91021767 | UGGUGCUACACAAGGAGCCC | − |
| 1568 | 84146 | ZNF644 | intron_01 | chr1: 91021726-91021989 | chr1: 91021741-91021760 | ACACAAGGAGCCCGGGCCCC | − |
| 1569 | 84146 | ZNF644 | intron_01 | chr1: 91021726-91021989 | chr1: 91021735-91021754 | GGAGCCCGGGCCCCGGGUUC | − |
| 1570 | 84146 | ZNF644 | intron_01 | chr1: 91021726-91021989 | chr1: 91021720-91021739 | GGCCGCCGCCUCCCCGAACC | + |
| 1571 | 84146 | ZNF644 | intron_01 | chr1: 91021726-91021989 | chr1: 91021731-91021750 | CCCGGGCCCCGGGUUCGGGG | − |
| 1572 | 84146 | ZNF644 | exon_02_nc | chr1: 91021689-91021725 | chr1: 91021719-91021738 | GUUCGGGGAGGCGGCGGCCG | − |
| 1573 | 84146 | ZNF644 | intron_02 | chr1: 91021509-91021688 | chr1: 91021655-91021674 | CGAGUCCCGCCCCGCGGCGG | + |
| 1574 | 84146 | ZNF644 | intron_02 | chr1: 91021509-91021688 | chr1: 91021652-91021671 | CGCCGAGUCCCGCCCCGCGG | + |
| 1575 | 84146 | ZNF644 | intron_02 | chr1: 91021509-91021688 | chr1: 91021645-91021664 | GCGGGACUCGGCGGGGGGAU | − |
| 1576 | 84146 | ZNF644 | intron_02 | chr1: 91021509-91021688 | chr1: 91021625-91021644 | GGGGGGGGGGCUUUCCGCUG | − |
| 1577 | 84146 | ZNF644 | intron_02 | chr1: 91021509-91021688 | chr1: 91021610-91021629 | CGCUGCGGCGUCGGAGGAUC | − |
| 1578 | 84146 | ZNF644 | intron_02 | chr1: 91021509-91021688 | chr1: 91021523-91021542 | GAGCAGCCAGUGAGCAGUAG | − |
| 1579 | 84146 | ZNF644 | intron_02 | chr1: 91021509-91021688 | chr1: 91021517-91021536 | CCAGUGAGCAGUAGGGGGAA | − |
| 1580 | 84146 | ZNF644 | exon_03_nc.1 | chr1: 91021474-91021508 | chr1: 91021488-91021507 | AUCAGGCGGCUUGGGGAGCC | − |
| 1581 | 84146 | ZNF644 | exon_03_nc.2 | chr1: 91021458-91021473 | chr1: 91021457-91021476 | AUUGCAAUGCACUGAGUAAC | − |
| 1582 | 84146 | ZNF644 | exon_03_nc.3 | chr1: 91021273-91021457 | chr1: 91021380-91021399 | AAUGCCAGAGCCAGCGUUUC | + |
| 1583 | 84146 | ZNF644 | exon_03_nc.3 | chr1: 91021273-91021457 | chr1: 91021387-91021406 | GUGGCCAGAAACGCUGGCUC | − |
| 1584 | 84146 | ZNF644 | exon_03_nc.3 | chr1: 91021273-91021457 | chr1: 91021341-91021360 | GCGGUCCUGUCCCAAGUAAG | + |
| 1585 | 84146 | ZNF644 | exon_03_nc.3 | chr1: 91021273-91021457 | chr1: 91021355-91021374 | UCUACACCCCUCCCCUUACU | − |
| 1586 | 84146 | ZNF644 | exon_03_nc.3 | chr1: 91021273-91021457 | chr1: 91021308-91021327 | AGAUCUUGCAGGACGGGGGG | + |
| 1587 | 84146 | ZNF644 | exon_03_nc.3 | chr1: 91021273-91021457 | chr1: 91021275-91021294 | GCCUGGGAAGUAACAGCAAG | − |
| 1588 | 84146 | ZNF644 | intron_03 | chr1: 91021202-91021272 | chr1: 91021204-91021223 | CUAAAGCUUUUUGCCUCUCC | − |
| 1589 | 84146 | ZNF644 | intron_03 | chr1: 91021202-91021272 | chr1: 91021188-91021207 | CCAGAGAAUCAGACCUGGAG | + |
| 1590 | 84146 | ZNF644 | exon_04_nc.1 | chr1: 91020529-91021201 | chr1: 91021157-91021176 | CUGGGAAGUUACUCUGCCAG | − |
| 1591 | 84146 | ZNF644 | exon_04_nc.1 | chr1: 91020529-91021201 | chr1: 91021149-91021168 | UUACUCUGCCAGAGGAAAGC | − |
| 1592 | 84146 | ZNF644 | exon_04_nc.1 | chr1: 91020529-91021201 | chr1: 91021109-91021128 | CAACUCAUCUUCAGGUUCAC | + |
| 1593 | 84146 | ZNF644 | exon_04_nc.1 | chr1: 91020529-91021201 | chr1: 91021079-91021098 | UUCUCAGUGAUUGGAAACUU | − |
| 1594 | 84146 | ZNF644 | exon_04_nc.1 | chr1: 91020529-91021201 | chr1: 91021076-91021095 | UCAGUGAUUGGAAACUUAGG | − |
| 1595 | 84146 | ZNF644 | exon_04_nc.1 | chr1: 91020529-91021201 | chr1: 91021073-91021092 | GUGAUUGGAAACUUAGGUGG | − |
| 1596 | 84146 | ZNF644 | exon_04_nc.1 | chr1: 91020529-91021201 | chr1: 91021026-91021045 | CUUCUACAGACAACUCUUGU | − |
| 1597 | 84146 | ZNF644 | exon_04_nc.1 | chr1: 91020529-91021201 | chr1: 91021025-91021044 | UUCUACAGACAACUCUUGUU | − |
| 1598 | 84146 | ZNF644 | exon_04_nc.1 | chr1: 91020529-91021201 | chr1: 91020909-91020928 | UGAUCAUCAAACUCAACGAG | − |
| 1599 | 84146 | ZNF644 | exon_04_nc.1 | chr1: 91020529-91021201 | chr1: 91020814-91020833 | UUAGGACUGGACAGGAUAGU | + |
| 1600 | 84146 | ZNF644 | exon_04_nc.1 | chr1: 91020529-91021201 | chr1: 91020739-91020758 | AACUAAAGCAAACUACUGCA | + |
| 1601 | 84146 | ZNF644 | intron_04 | chr1: 90982371-91020447 | chr1: 91020420-91020439 | AAUUAUAUCAUACUUUGUGU | − |
| 1602 | 84146 | ZNF644 | intron_04 | chr1: 90982371-91020447 | chr1: 91020346-91020365 | AAUUAACAGAAUUCCUUGGU | − |
| 1603 | 84146 | ZNF644 | intron_04 | chr1: 90982371-91020447 | chr1: 91020330-91020349 | UUUAAAUAUCCCUCCAACCA | + |
| 1604 | 84146 | ZNF644 | intron_04 | chr1: 90982371-91020447 | chr1: 91020343-91020362 | UAACAGAAUUCCUUGGUUGG | − |
| 1605 | 84146 | ZNF644 | intron_04 | chr1: 90982371-91020447 | chr1: 91020342-91020361 | AACAGAAUUCCUUGGUUGGA | − |
| 1606 | 84146 | ZNF644 | intron_04 | chr1: 90982371-91020447 | chr1: 91020133-91020152 | UGGAUCAUAAAGUUUUACAG | − |
| 1607 | 84146 | ZNF644 | intron_04 | chr1: 90982371-91020447 | chr1: 91020075-91020094 | UCCUCAAUAUAUUGUAAAAG | + |
| 1608 | 84146 | ZNF644 | intron_04 | chr1: 90982371-91020447 | chr1: 91020052-91020071 | GCCACUAACUUAAUCAUCUC | + |
| 1609 | 84146 | ZNF644 | intron_04 | chr1: 90982371-91020447 | chr1: 91020000-91020019 | AUGACAAAUACAAACAGCAA | + |
| 1610 | 84146 | ZNF644 | intron_04 | chr1: 90982371-91020447 | chr1: 91019985-91020004 | GUCAUAUUGCUGGGAUGAGA | − |
| 1611 | 84146 | ZNF644 | intron_04 | chr1: 90982371-91020447 | chr1: 91019951-91019970 | AACUAAUGGUUAAAAAAACA | − |
| 1612 | 84146 | ZNF644 | intron_04 | chr1: 90982371-91020447 | chr1: 91019548-91019567 | UUCAUAUUCUGUGGUUAACU | − |
| 1613 | 84146 | ZNF644 | intron_04 | chr1: 90982371-91020447 | chr1: 91019514-91019533 | ACUUUCAGUGAAACAAAAUC | − |
| 1614 | 84146 | ZNF644 | intron_04 | chr1: 90982371-91020447 | chr1: 91019381-91019400 | AAAGAAAUUUAUCAAGUCCC | + |
| 1615 | 84146 | ZNF644 | intron_04 | chr1: 90982371-91020447 | chr1: 91019331-91019350 | UUCUUUUCCUACAUAAUAAC | + |
| 1616 | 84146 | ZNF644 | intron_04 | chr1: 90982371-91020447 | chr1: 91019175-91019194 | AAUUUCCUAACAGACCUUAG | + |
| 1617 | 84146 | ZNF644 | intron_04 | chr1: 90982371-91020447 | chr1: 91018988-91019007 | AAUUUUCAACAUUAUGUGAG | − |
| 1618 | 84146 | ZNF644 | intron_04 | chr1: 90982371-91020447 | chr1: 91018922-91018941 | GGUUAUUUGUAGUUAUAAAG | − |
| 1619 | 84146 | ZNF644 | intron_04 | chr1: 90982371-91020447 | chr1: 91018854-91018873 | UUCAAGUUAUAAGAGUGUUU | − |
| 1620 | 84146 | ZNF644 | intron_04 | chr1: 90982371-91020447 | chr1: 91018833-91018852 | GGUUGAAUUGAGACUGUUAA | − |
| 1621 | 84146 | ZNF644 | intron_04 | chr1: 90982371-91020447 | chr1: 91018832-91018851 | GUUGAAUUGAGACUGUUAAU | − |
| 1622 | 84146 | ZNF644 | intron_04 | chr1: 90982371-91020447 | chr1: 91018822-91018841 | GACUGUUAAUGGGUAGCAGG | − |
| 1623 | 84146 | ZNF644 | intron_04 | chr1: 90982371-91020447 | chr1: 91018786-91018805 | UCAAAGAGAAUAGAAGUGGU | − |
| 1624 | 84146 | ZNF644 | intron_04 | chr1: 90982371-91020447 | chr1: 91018764-91018783 | GAUAUCUGCAAUCUAGAGAA | − |
| 1625 | 84146 | ZNF644 | intron_04 | chr1: 90982371-91020447 | chr1: 91018759-91018778 | CUGCAAUCUAGAGAAAGGUC | − |
| 1626 | 84146 | ZNF644 | intron_04 | chr1: 90982371-91020447 | chr1: 91018680-91018699 | AGAAUCACAUCCUGAGAAAA | + |
| 1627 | 84146 | ZNF644 | intron_04 | chr1: 90982371-91020447 | chr1: 91018677-91018696 | UCUCAGGAUGUGAUUCUGGA | − |
| 1628 | 84146 | ZNF644 | intron_04 | chr1: 90982371-91020447 | chr1: 91018598-91018617 | CUUGCAGCAAAUGGAGAAAU | − |
| 1629 | 84146 | ZNF644 | intron_04 | chr1: 90982371-91020447 | chr1: 91018419-91018438 | UUUACACUUAUUAAUCUUUC | − |
| 1630 | 84146 | ZNF644 | intron_04 | chr1: 90982371-91020447 | chr1: 91018392-91018411 | GAGAAUGUCUAUUUCGUAUA | − |
| 1631 | 84146 | ZNF644 | intron_04 | chr1: 90982371-91020447 | chr1: 91018328-91018347 | GACUGAAGCAGUUCUAGAAG | − |
| 1632 | 84146 | ZNF644 | intron_04 | chr1: 90982371-91020447 | chr1: 91018246-91018265 | CCAAAACUCAAUGGUGUAAA | + |
| 1633 | 84146 | ZNF644 | intron_04 | chr1: 90982371-91020447 | chr1: 91018134-91018153 | AAGAUCACAGGAGACCCAGA | − |
| 1634 | 84146 | ZNF644 | intron_04 | chr1: 90982371-91020447 | chr1: 91018060-91018079 | CAAGAAAACACCUUUUUCAU | + |
| 1635 | 84146 | ZNF644 | intron_04 | chr1: 90982371-91020447 | chr1: 91018073-91018092 | AGAGGAAGUUCCCAUGAAAA | − |
| 1636 | 84146 | ZNF644 | intron_04 | chr1: 90982371-91020447 | chr1: 91018054-91018073 | AAGGUGUUUUCUUGUCUCUA | − |
| 1637 | 84146 | ZNF644 | intron_04 | chr1: 90982371-91020447 | chr1: 91018001-91018020 | AGAUCUGCCAAGUUGAACCA | − |
| 1638 | 84146 | ZNF644 | intron_04 | chr1: 90982371-91020447 | chr1: 91017653-91017672 | CUAUCCUUUUUGAACUUCCU | − |
| 1639 | 84146 | ZNF644 | intron_04 | chr1: 90982371-91020447 | chr1: 91017633-91017652 | AUAAUCACAUAAGAGUUCCC | + |
| 1640 | 84146 | ZNF644 | intron_04 | chr1: 90982371-91020447 | chr1: 91017565-91017584 | UAACAUCUCUCAAUUGUCAA | + |
| 1641 | 84146 | ZNF644 | intron_04 | chr1: 90982371-91020447 | chr1: 91017430-91017449 | UGGUUGGGAGAAAGUGAGAC | − |
| 1642 | 84146 | ZNF644 | intron_04 | chr1: 90982371-91020447 | chr1: 91017372-91017391 | GGCCAAGAUUAGUAGGAGAG | + |
| 1643 | 84146 | ZNF644 | intron_04 | chr1: 90982371-91020447 | chr1: 91017371-91017390 | GGGCCAAGAUUAGUAGGAGA | + |
| 1644 | 84146 | ZNF644 | intron_04 | chr1: 90982371-91020447 | chr1: 91017377-91017396 | UUCCCCUCUCCUACUAAUCU | − |
| 1645 | 84146 | ZNF644 | intron_04 | chr1: 90982371-91020447 | chr1: 91017351-91017370 | GCUAGCAGACAGAAGAGGUA | + |
| 1646 | 84146 | ZNF644 | intron_04 | chr1: 90982371-91020447 | chr1: 91017319-91017338 | CAAAGGAUUCCAAAUGAAAU | + |
| 1647 | 84146 | ZNF644 | intron_04 | chr1: 90982371-91020447 | chr1: 91017318-91017337 | UCAAAGGAUUCCAAAUGAAA | + |
| 1648 | 84146 | ZNF644 | intron_04 | chr1: 90982371-91020447 | chr1: 91017246-91017265 | AAUUCUGUUAGCCUAGAUUU | − |
| 1649 | 84146 | ZNF644 | intron_04 | chr1: 90982371-91020447 | chr1: 91017231-91017250 | GAUUUUGGUAGAAUUGAAGC | − |
| 1650 | 84146 | ZNF644 | intron_04 | chr1: 90982371-91020447 | chr1: 91016700-91016719 | UAAAAUAAUUGAUAGACUAC | + |
| 1651 | 84146 | ZNF644 | intron_04 | chr1: 90982371-91020447 | chr1: 91016244-91016263 | CUUUCAGAGCACCAUUUAUU | − |
| 1652 | 84146 | ZNF644 | intron_04 | chr1: 90982371-91020447 | chr1: 91016240-91016259 | CAGAGCACCAUUUAUUGGGG | − |
| 1653 | 84146 | ZNF644 | intron_04 | chr1: 90982371-91020447 | chr1: 91016233-91016252 | CCAUUUAUUGGGGAGGAGAG | − |
| 1654 | 84146 | ZNF644 | intron_04 | chr1: 90982371-91020447 | chr1: 91016201-91016220 | UUCACAAACCAACAAUAAAU | + |
| 1655 | 84146 | ZNF644 | intron_04 | chr1: 90982371-91020447 | chr1: 91016202-91016221 | AAUUUAUUGUUGGUUUGUGA | − |
| 1656 | 84146 | ZNF644 | intron_04 | chr1: 90982371-91020447 | chr1: 91016191-91016210 | GGUUUGUGAAGGUGGGUAAA | − |
| 1657 | 84146 | ZNF644 | intron_04 | chr1: 90982371-91020447 | chr1: 91016142-91016161 | GUGAGUCAGUAGCAAACAAA | + |
| 1658 | 84146 | ZNF644 | intron_04 | chr1: 90982371-91020447 | chr1: 91016017-91016036 | ACCCUGUCAAUUUUACUUCA | + |
| 1659 | 84146 | ZNF644 | intron_04 | chr1: 90982371-91020447 | chr1: 91016021-91016040 | GCCUUGAAGUAAAAUUGACA | − |
| 1660 | 84146 | ZNF644 | intron_04 | chr1: 90982371-91020447 | chr1: 91015949-91015968 | ACCCUAAACCUCUUUGAAGA | + |
| 1661 | 84146 | ZNF644 | intron_04 | chr1: 90982371-91020447 | chr1: 91015901-91015920 | CAUUGUAUGCCAGAAAGCUA | + |
| 1662 | 84146 | ZNF644 | intron_04 | chr1: 90982371-91020447 | chr1: 91015789-91015808 | UACAACUGCAAAUCACUCAC | + |
| 1663 | 84146 | ZNF644 | intron_04 | chr1: 90982371-91020447 | chr1: 91015751-91015770 | UUAUCGGCAUGGCUUAAAAU | + |
| 1664 | 84146 | ZNF644 | intron_04 | chr1: 90982371-91020447 | chr1: 91015750-91015769 | UUUAUCGGCAUGGCUUAAAA | + |
| 1665 | 84146 | ZNF644 | intron_04 | chr1: 90982371-91020447 | chr1: 91015734-91015753 | UAAAGACAAGGUUGUUAUAG | − |
| 1666 | 84146 | ZNF644 | intron_04 | chr1: 90982371-91020447 | chr1: 91015650-91015669 | CAUUCCUGAAAUAUUUAACC | + |
| 1667 | 84146 | ZNF644 | intron_04 | chr1: 90982371-91020447 | chr1: 91015657-91015676 | AUAACCAGGUUAAAUAUUUC | − |
| 1668 | 84146 | ZNF644 | intron_04 | chr1: 90982371-91020447 | chr1: 91015622-91015641 | UACUCAUCUGCUGACAGUGC | + |
| 1669 | 84146 | ZNF644 | intron_04 | chr1: 90982371-91020447 | chr1: 91015613-91015632 | GCAGAUGAGUAGAUACACUU | − |
| 1670 | 84146 | ZNF644 | intron_04 | chr1: 90982371-91020447 | chr1: 91015559-91015578 | AGACAAACCAAUGCACUGGC | + |
| 1671 | 84146 | ZNF644 | intron_04 | chr1: 90982371-91020447 | chr1: 91015555-91015574 | ACAAAGACAAACCAAUGCAC | + |
| 1672 | 84146 | ZNF644 | intron_04 | chr1: 90982371-91020447 | chr1: 91015569-91015588 | UUAUUUCCCAGCCAGUGCAU | − |
| 1673 | 84146 | ZNF644 | intron_04 | chr1: 90982371-91020447 | chr1: 91015506-91015525 | CCUCACAGUCAAAAAUUGAA | + |
| 1674 | 84146 | ZNF644 | intron_04 | chr1: 90982371-91020447 | chr1: 91015509-91015528 | CCUUUCAAUUUUUGACUGUG | − |
| 1675 | 84146 | ZNF644 | intron_04 | chr1: 90982371-91020447 | chr1: 91015501-91015520 | UUUUUGACUGUGAGGCCAUG | − |
| 1676 | 84146 | ZNF644 | intron_04 | chr1: 90982371-91020447 | chr1: 91015357-91015376 | UUUCAUUGGAUAGUCUGAGU | − |
| 1677 | 84146 | ZNF644 | intron_04 | chr1: 90982371-91020447 | chr1: 91015356-91015375 | UUCAUUGGAUAGUCUGAGUU | − |
| 1678 | 84146 | ZNF644 | intron_04 | chr1: 90982371-91020447 | chr1: 91015287-91015306 | UGUUUUGUAUAUGUCUGUGC | − |
| 1679 | 84146 | ZNF644 | intron_04 | chr1: 90982371-91020447 | chr1: 91015216-91015235 | UUGUGCUAGGAGGAGGUUGG | + |
| 1680 | 84146 | ZNF644 | intron_04 | chr1: 90982371-91020447 | chr1: 91015203-91015222 | UUAAAAUCCGUGUUUGUGCU | + |
| 1681 | 84146 | ZNF644 | intron_04 | chr1: 90982371-91020447 | chr1: 91015145-91015164 | AAUUUUAGGUUCAUUUGAGG | − |
| 1682 | 84146 | ZNF644 | intron_04 | chr1: 90982371-91020447 | chr1: 91015143-91015162 | UUUUAGGUUCAUUUGAGGAG | − |
| 1683 | 84146 | ZNF644 | intron_04 | chr1: 90982371-91020447 | chr1: 91015088-91015107 | GCUUGAAAAAUACAGCAAUU | − |
| 1684 | 84146 | ZNF644 | intron_04 | chr1: 90982371-91020447 | chr1: 91015074-91015093 | GCAAUUUGGAAAGUGAGGGA | − |
| 1685 | 84146 | ZNF644 | intron_04 | chr1: 90982371-91020447 | chr1: 91014904-91014923 | GAGUAGCCAAGUUUGAACCU | − |
| 1686 | 84146 | ZNF644 | intron_04 | chr1: 90982371-91020447 | chr1: 91014804-91014823 | UUACAAAUUGUGUAACAACU | + |
| 1687 | 84146 | ZNF644 | intron_04 | chr1: 90982371-91020447 | chr1: 91014684-91014703 | GACAAAGAGCCUUUAUAUGG | + |
| 1688 | 84146 | ZNF644 | intron_04 | chr1: 90982371-91020447 | chr1: 91014681-91014700 | CAAGACAAAGAGCCUUUAUA | + |
| 1689 | 84146 | ZNF644 | intron_04 | chr1: 90982371-91020447 | chr1: 91014669-91014688 | UUGUCUUGGCUGCUGGACAU | − |
| 1690 | 84146 | ZNF644 | intron_04 | chr1: 90982371-91020447 | chr1: 91014562-91014581 | UAUGGGAUUUGGAUUGCUAC | − |
| 1691 | 84146 | ZNF644 | intron_04 | chr1: 90982371-91020447 | chr1: 91014518-91014537 | AGUCAAAUGUCCCACCAGCA | + |
| 1692 | 84146 | ZNF644 | intron_04 | chr1: 90982371-91020447 | chr1: 91014391-91014410 | UCCCUUUAAGAUUUUUAACA | + |
| 1693 | 84146 | ZNF644 | intron_04 | chr1: 90982371-91020447 | chr1: 91013735-91013754 | GCUACUGAAUACCUGAACUC | + |
| 1694 | 84146 | ZNF644 | intron_04 | chr1: 90982371-91020447 | chr1: 91013624-91013643 | CUGUUCUCAGCUAUCCUUUA | + |
| 1695 | 84146 | ZNF644 | intron_04 | chr1: 90982371-91020447 | chr1: 91013526-91013545 | AGUGGCUUGAAUCCAGUUUA | − |
| 1696 | 84146 | ZNF644 | intron_04 | chr1: 90982371-91020447 | chr1: 91013511-91013530 | CCAAACCAAAUUCCCUAAAC | + |
| 1697 | 84146 | ZNF644 | intron_04 | chr1: 90982371-91020447 | chr1: 91013519-91013538 | UGAAUCCAGUUUAGGGAAUU | − |
| 1698 | 84146 | ZNF644 | intron_04 | chr1: 90982371-91020447 | chr1: 91013514-91013533 | CCAGUUUAGGGAAUUUGGUU | − |
| 1699 | 84146 | ZNF644 | intron_04 | chr1: 90982371-91020447 | chr1: 91013513-91013532 | CAGUUUAGGGAAUUUGGUUU | − |
| 1700 | 84146 | ZNF644 | intron_04 | chr1: 90982371-91020447 | chr1: 91012984-91013003 | AAGAUCGACUAGGCUUUGUU | + |
| 1701 | 84146 | ZNF644 | intron_04 | chr1: 90982371-91020447 | chr1: 91012961-91012980 | AAGGGAAAGUGUUUCAUUUA | − |
| 1702 | 84146 | ZNF644 | intron_04 | chr1: 90982371-91020447 | chr1: 91012912-91012931 | AUGAUGGAGAUUGAUAAAGA | − |
| 1703 | 84146 | ZNF644 | intron_04 | chr1: 90982371-91020447 | chr1: 91012734-91012753 | GGGAGGUACUGGGUUACACC | − |
| 1704 | 84146 | ZNF644 | intron_04 | chr1: 90982371-91020447 | chr1: 91012526-91012545 | UUUAUGGUGAUAGAGGUUAG | + |
| 1705 | 84146 | ZNF644 | intron_04 | chr1: 90982371-91020447 | chr1: 91012225-91012244 | CAUAUUUGUCCUCCCUCCCA | − |
| 1706 | 84146 | ZNF644 | intron_04 | chr1: 90982371-91020447 | chr1: 91012210-91012229 | AAUUCUCACUACCCUUGGGA | + |
| 1707 | 84146 | ZNF644 | intron_04 | chr1: 90982371-91020447 | chr1: 91012224-91012243 | AUAUUUGUCCUCCCUCCCAA | − |
| 1708 | 84146 | ZNF644 | intron_04 | chr1: 90982371-91020447 | chr1: 91012206-91012225 | CAUCAAUUCUCACUACCCUU | + |
| 1709 | 84146 | ZNF644 | intron_04 | chr1: 90982371-91020447 | chr1: 91012205-91012224 | GCAUCAAUUCUCACUACCCU | + |
| 1710 | 84146 | ZNF644 | intron_04 | chr1: 90982371-91020447 | chr1: 91012152-91012171 | UGGCAUUGUUAUGAAUUGGG | − |
| 1711 | 84146 | ZNF644 | intron_04 | chr1: 90982371-91020447 | chr1: 91012143-91012162 | UAUGAAUUGGGAGGUAAAUC | − |
| 1712 | 84146 | ZNF644 | intron_04 | chr1: 90982371-91020447 | chr1: 91012090-91012109 | UCUCUGAUUUUGUCACUGGG | + |
| 1713 | 84146 | ZNF644 | intron_04 | chr1: 90982371-91020447 | chr1: 91012088-91012107 | CCUCUCUGAUUUUGUCACUG | + |
| 1714 | 84146 | ZNF644 | intron_04 | chr1: 90982371-91020447 | chr1: 91012086-91012105 | CACCUCUCUGAUUUUGUCAC | + |
| 1715 | 84146 | ZNF644 | intron_04 | chr1: 90982371-91020447 | chr1: 91012091-91012110 | CCCCAGUGACAAAAUCAGAG | − |
| 1716 | 84146 | ZNF644 | intron_04 | chr1: 90982371-91020447 | chr1: 91011888-91011907 | CAAAAACCAUCUAUAUAAGG | + |
| 1717 | 84146 | ZNF644 | intron_04 | chr1: 90982371-91020447 | chr1: 91011890-91011909 | CUCCUUAUAUAGAUGGUUUU | − |
| 1718 | 84146 | ZNF644 | intron_04 | chr1: 90982371-91020447 | chr1: 91011862-91011881 | CCUGGAAGCUACCAUCAAAG | + |
| 1719 | 84146 | ZNF644 | intron_04 | chr1: 90982371-91020447 | chr1: 91011719-91011738 | AUUCUACUUUUCUGUUGAAC | + |
| 1720 | 84146 | ZNF644 | intron_04 | chr1: 90982371-91020447 | chr1: 91011643-91011662 | AUUUAUAAAGUCUCCUACAU | + |
| 1721 | 84146 | ZNF644 | intron_04 | chr1: 90982371-91020447 | chr1: 91011642-91011661 | CAUUUAUAAAGUCUCCUACA | + |
| 1722 | 84146 | ZNF644 | intron_04 | chr1: 90982371-91020447 | chr1: 91011556-91011575 | UACAACUAUUAAUUCCAUUU | + |
| 1723 | 84146 | ZNF644 | intron_04 | chr1: 90982371-91020447 | chr1: 91011555-91011574 | CUACAACUAUUAAUUCCAUU | + |
| 1724 | 84146 | ZNF644 | intron_04 | chr1: 90982371-91020447 | chr1: 91011500-91011519 | AAUACUGCUAUACUACAAUA | + |
| 1725 | 84146 | ZNF644 | intron_04 | chr1: 90982371-91020447 | chr1: 91011401-91011420 | UCUUCACAUUCUAGUAUAUC | − |
| 1726 | 84146 | ZNF644 | intron_04 | chr1: 90982371-91020447 | chr1: 91011151-91011170 | UAGCUUUUGUGAAGUAUAGA | − |
| 1727 | 84146 | ZNF644 | intron_04 | chr1: 90982371-91020447 | chr1: 91011137-91011156 | UAUAGAAGGCUAAAGCAAAU | − |
| 1728 | 84146 | ZNF644 | intron_04 | chr1: 90982371-91020447 | chr1: 91011063-91011082 | ACUUUACACAUAACAGCUUU | − |
| 1729 | 84146 | ZNF644 | intron_04 | chr1: 90982371-91020447 | chr1: 91011061-91011080 | UUUACACAUAACAGCUUUUG | − |
| 1730 | 84146 | ZNF644 | intron_04 | chr1: 90982371-91020447 | chr1: 91010766-91010785 | AUAUGCAACCCUACCCCUAG | + |
| 1731 | 84146 | ZNF644 | intron_04 | chr1: 90982371-91020447 | chr1: 91010583-91010602 | ACACCACUUCUUCAAAAUCU | + |
| 1732 | 84146 | ZNF644 | intron_04 | chr1: 90982371-91020447 | chr1: 91010121-91010140 | UGGAGGGAUCUAAAGAAGUU | − |
| 1733 | 84146 | ZNF644 | intron_04 | chr1: 90982371-91020447 | chr1: 91009978-91009997 | GUGAUUAUUAUCUUUGUGAG | − |
| 1734 | 84146 | ZNF644 | intron_04 | chr1: 90982371-91020447 | chr1: 91009972-91009991 | AUUAUCUUUGUGAGUGGGAA | − |
| 1735 | 84146 | ZNF644 | intron_04 | chr1: 90982371-91020447 | chr1: 91009722-91009741 | CCAAUAAAGUUAUGCUAUAA | − |
| 1736 | 84146 | ZNF644 | intron_04 | chr1: 90982371-91020447 | chr1: 91009687-91009706 | UAAAAAAUAUUUAAGGUAAC | − |
| 1737 | 84146 | ZNF644 | intron_04 | chr1: 90982371-91020447 | chr1: 91009590-91009609 | UAAUUUGUAUUGGAGCUGGC | − |
| 1738 | 84146 | ZNF644 | intron_04 | chr1: 90982371-91020447 | chr1: 91009123-91009142 | UACCUGUUGGAAAGGAGCGA | + |
| 1739 | 84146 | ZNF644 | intron_04 | chr1: 90982371-91020447 | chr1: 91008908-91008927 | AUGAAGUCCUUUCCAGCUUU | − |
| 1740 | 84146 | ZNF644 | intron_04 | chr1: 90982371-91020447 | chr1: 91008824-91008843 | AGGUGAUACAUGAAUAACCA | + |
| 1741 | 84146 | ZNF644 | intron_04 | chr1: 90982371-91020447 | chr1: 91008764-91008783 | GACGUUAAUAGUGAGGUUUU | − |
| 1742 | 84146 | ZNF644 | intron_04 | chr1: 90982371-91020447 | chr1: 91008746-91008765 | UUUGGGAAUGUGGUAAAACC | − |
| 1743 | 84146 | ZNF644 | intron_04 | chr1: 90982371-91020447 | chr1: 91008725-91008744 | ACAAAGUCAAAUAUACCUCC | + |
| 1744 | 84146 | ZNF644 | intron_04 | chr1: 90982371-91020447 | chr1: 91008682-91008701 | CAGCUAAAGCAAAAUACAGU | − |
| 1745 | 84146 | ZNF644 | intron_04 | chr1: 90982371-91020447 | chr1: 91008650-91008669 | CUCUAGGUCCCAGUGAUAGU | + |
| 1746 | 84146 | ZNF644 | intron_04 | chr1: 90982371-91020447 | chr1: 91008634-91008653 | GAGAUGUAGAUGAAAUCUCU | + |
| 1747 | 84146 | ZNF644 | intron_04 | chr1: 90982371-91020447 | chr1: 91008606-91008625 | GGGGUUUCUGUAUGAUAGUA | − |
| 1748 | 84146 | ZNF644 | intron_04 | chr1: 90982371-91020447 | chr1: 91008597-91008616 | GUAUGAUAGUAUGGGUGAGA | − |
| 1749 | 84146 | ZNF644 | intron_04 | chr1: 90982371-91020447 | chr1: 91008445-91008464 | AGGGCUAUUCCCAAGAACUC | + |
| 1750 | 84146 | ZNF644 | intron_04 | chr1: 90982371-91020447 | chr1: 91008426-91008445 | UCUACAAACAAAUGGAGGUA | + |
| 1751 | 84146 | ZNF644 | intron_04 | chr1: 90982371-91020447 | chr1: 91008425-91008444 | AUCUACAAACAAAUGGAGGU | + |
| 1752 | 84146 | ZNF644 | intron_04 | chr1: 90982371-91020447 | chr1: 91008421-91008440 | UCUCAUCUACAAACAAAUGG | + |
| 1753 | 84146 | ZNF644 | intron_04 | chr1: 90982371-91020447 | chr1: 91008388-91008407 | CCUUCUCCACUGACAGCAGA | + |
| 1754 | 84146 | ZNF644 | intron_04 | chr1: 90982371-91020447 | chr1: 91008332-91008351 | ACCAAUUCCUGAAGCAUUCC | + |
| 1755 | 84146 | ZNF644 | intron_04 | chr1: 90982371-91020447 | chr1: 91008298-91008317 | CUUUUAGACAAUUCCUUCAG | + |
| 1756 | 84146 | ZNF644 | intron_04 | chr1: 90982371-91020447 | chr1: 91008071-91008090 | CCAGUAUUCUCAGAACUGGG | + |
| 1757 | 84146 | ZNF644 | intron_04 | chr1: 90982371-91020447 | chr1: 91008033-91008052 | UUUUAAUCUCACAGCUAGAU | + |
| 1758 | 84146 | ZNF644 | intron_04 | chr1: 90982371-91020447 | chr1: 91008032-91008051 | CUUUUAAUCUCACAGCUAGA | + |
| 1759 | 84146 | ZNF644 | intron_04 | chr1: 90982371-91020447 | chr1: 91008003-91008022 | UCUCAGCAGUUUGCUGUCAC | + |
| 1760 | 84146 | ZNF644 | intron_04 | chr1: 90982371-91020447 | chr1: 91007933-91007952 | UUAAUGAGUAGACAUACUGU | + |
| 1761 | 84146 | ZNF644 | intron_04 | chr1: 90982371-91020447 | chr1: 91007902-91007921 | AGGCACUUAAAAGUUGCCUA | + |
| 1762 | 84146 | ZNF644 | intron_04 | chr1: 90982371-91020447 | chr1: 91007901-91007920 | GAGGCACUUAAAAGUUGCCU | + |
| 1763 | 84146 | ZNF644 | intron_04 | chr1: 90982371-91020447 | chr1: 91007852-91007871 | UAAGGUUAUCCUCAAAUGUU | + |
| 1764 | 84146 | ZNF644 | intron_04 | chr1: 90982371-91020447 | chr1: 91007334-91007353 | CAAGCGAUUUGCUGGGAUUA | + |
| 1765 | 84146 | ZNF644 | intron_04 | chr1: 90982371-91020447 | chr1: 91006250-91006269 | CAGGACCUAGCCAACCACGG | + |
| 1766 | 84146 | ZNF644 | intron_04 | chr1: 90982371-91020447 | chr1: 91005626-91005645 | GAAAUUGGUAAGUUAAUAUG | + |
| 1767 | 84146 | ZNF644 | intron_04 | chr1: 90982371-91020447 | chr1: 91005499-91005518 | AAUGUUCUUUAGUAUGUACU | + |
| 1768 | 84146 | ZNF644 | intron_04 | chr1: 90982371-91020447 | chr1: 91005413-91005432 | AUAGUAUAGAUAGAAGAUCA | + |
| 1769 | 84146 | ZNF644 | intron_04 | chr1: 90982371-91020447 | chr1: 91005029-91005048 | ACAAAAAGCACAUAGGCAGA | + |
| 1770 | 84146 | ZNF644 | intron_04 | chr1: 90982371-91020447 | chr1: 91004970-91004989 | AGAUGUAAAUUCCACUUUAU | + |
| 1771 | 84146 | ZNF644 | intron_04 | chr1: 90982371-91020447 | chr1: 91004572-91004591 | CAUGGUGAAGGUAACCACAU | + |
| 1772 | 84146 | ZNF644 | intron_04 | chr1: 90982371-91020447 | chr1: 91004443-91004462 | CAACUAUUUUUCAUAACAGA | + |
| 1773 | 84146 | ZNF644 | intron_04 | chr1: 90982371-91020447 | chr1: 91004198-91004217 | UAAACAUCCAAAAAAGCUCA | + |
| 1774 | 84146 | ZNF644 | intron_04 | chr1: 90982371-91020447 | chr1: 91004099-91004118 | AUAGGAGUUCUACAAAAGAG | + |
| 1775 | 84146 | ZNF644 | intron_04 | chr1: 90982371-91020447 | chr1: 91003747-91003766 | AGUUCACAAAACUGUCCCUG | + |
| 1776 | 84146 | ZNF644 | intron_04 | chr1: 90982371-91020447 | chr1: 90997780-90997799 | UUAAUUCCCUUUCCAAGCAA | + |
| 1777 | 84146 | ZNF644 | intron_04 | chr1: 90982371-91020447 | chr1: 90997455-90997474 | UAAAAUAACAAACAACGCUG | + |
| 1778 | 84146 | ZNF644 | intron_04 | chr1: 90982371-91020447 | chr1: 90997144-90997163 | GAGAGCCACAUGUACAGAAA | + |
| 1779 | 84146 | ZNF644 | intron_04 | chr1: 90982371-91020447 | chr1: 90997087-90997106 | GCUUUAAAAAGAAAAGCUGG | + |
| 1780 | 84146 | ZNF644 | intron_04 | chr1: 90982371-91020447 | chr1: 90996883-90996902 | UAACACAUCUGGUGGUCUCC | + |
| 1781 | 84146 | ZNF644 | intron_04 | chr1: 90982371-91020447 | chr1: 90996872-90996891 | CUGUCAUUAUUUAACACAUC | + |
| 1782 | 84146 | ZNF644 | intron_04 | chr1: 90982371-91020447 | chr1: 90996573-90996592 | CCAAGUGCUUGGAACCAGUC | + |
| 1783 | 84146 | ZNF644 | intron_04 | chr1: 90982371-91020447 | chr1: 90996562-90996581 | AAUGCUUGAGUCCAAGUGCU | + |
| 1784 | 84146 | ZNF644 | intron_04 | chr1: 90982371-91020447 | chr1: 90996418-90996437 | GGGAAGACCAGCACACUUUA | + |
| 1785 | 84146 | ZNF644 | intron_04 | chr1: 90982371-91020447 | chr1: 90996398-90996417 | UAGAUGGCUGAAUCUUAUUU | + |
| 1786 | 84146 | ZNF644 | intron_04 | chr1: 90982371-91020447 | chr1: 90996397-90996416 | AUAGAUGGCUGAAUCUUAUU | + |
| 1787 | 84146 | ZNF644 | intron_04 | chr1: 90982371-91020447 | chr1: 90996301-90996320 | CAUAAACCCAGCAAGAUCAC | + |
| 1788 | 84146 | ZNF644 | intron_04 | chr1: 90982371-91020447 | chr1: 90996091-90996110 | AAAAGGUACUCAGUCACAUU | + |
| 1789 | 84146 | ZNF644 | intron_04 | chr1: 90982371-91020447 | chr1: 90996074-90996093 | CUGGCAAUACAUAUAUUAAA | + |
| 1790 | 84146 | ZNF644 | intron_04 | chr1: 90982371-91020447 | chr1: 90995855-90995874 | AAUCAAAAACAUGACAUCAG | + |
| 1791 | 84146 | ZNF644 | intron_04 | chr1: 90982371-91020447 | chr1: 90995377-90995396 | ACAUAUCCUAAGAGACCAGU | + |
| 1792 | 84146 | ZNF644 | intron_04 | chr1: 90982371-91020447 | chr1: 90994924-90994943 | CAAGUUUGCAGUCUGGGCCC | + |
| 1793 | 84146 | ZNF644 | intron_04 | chr1: 90982371-91020447 | chr1: 90994918-90994937 | GGAGACCAAGUUUGCAGUCU | + |
| 1794 | 84146 | ZNF644 | intron_04 | chr1: 90982371-91020447 | chr1: 90994814-90994833 | AACCAACUUACUCAGACACU | + |
| 1795 | 84146 | ZNF644 | intron_04 | chr1: 90982371-91020447 | chr1: 90994715-90994734 | UAGAAGCUCUGUAGAACAGC | + |
| 1796 | 84146 | ZNF644 | intron_04 | chr1: 90982371-91020447 | chr1: 90994647-90994666 | AUUCCCCAACUAUGCAGUGU | + |
| 1797 | 84146 | ZNF644 | intron_04 | chr1: 90982371-91020447 | chr1: 90994539-90994558 | GAGAAGACCUGAAGGGAUUG | + |
| 1798 | 84146 | ZNF644 | intron_04 | chr1: 90982371-91020447 | chr1: 90994531-90994550 | UAGGCACAGAGAAGACCUGA | + |
| 1799 | 84146 | ZNF644 | intron_04 | chr1: 90982371-91020447 | chr1: 90994512-90994531 | UGGAUGACUGAUAAACCAGU | + |
| 1800 | 84146 | ZNF644 | intron_04 | chr1: 90982371-91020447 | chr1: 90994449-90994468 | AUGGCAGUCAGAGAACCAGA | + |
| 1801 | 84146 | ZNF644 | intron_04 | chr1: 90982371-91020447 | chr1: 90994448-90994467 | CAUGGCAGUCAGAGAACCAG | + |
| 1802 | 84146 | ZNF644 | intron_04 | chr1: 90982371-91020447 | chr1: 90994420-90994439 | AAACAGCUAGAAAUUUAAAU | + |
| 1803 | 84146 | ZNF644 | intron_04 | chr1: 90982371-91020447 | chr1: 90994377-90994396 | AUAAAGACAGUAUCACUGUA | + |
| 1804 | 84146 | ZNF644 | intron_04 | chr1: 90982371-91020447 | chr1: 90994376-90994395 | GAUAAAGACAGUAUCACUGU | + |
| 1805 | 84146 | ZNF644 | intron_04 | chr1: 90982371-91020447 | chr1: 90994354-90994373 | AAGCACACAAAAAUUAUCUC | + |
| 1806 | 84146 | ZNF644 | intron_04 | chr1: 90982371-91020447 | chr1: 90994353-90994372 | AGAUAAUUUUUGUGUGCUUG | − |
| 1807 | 84146 | ZNF644 | intron_04 | chr1: 90982371-91020447 | chr1: 90994203-90994222 | UUCAUGGAGAGAACAUGUUC | + |
| 1808 | 84146 | ZNF644 | intron_04 | chr1: 90982371-91020447 | chr1: 90994100-90994119 | GUACAUUUGCAAAAACUAUU | + |
| 1809 | 84146 | ZNF644 | intron_04 | chr1: 90982371-91020447 | chr1: 90994099-90994118 | AGUACAUUUGCAAAAACUAU | + |
| 1810 | 84146 | ZNF644 | intron_04 | chr1: 90982371-91020447 | chr1: 90993998-90994017 | AGGAUAAACAAGUGACUCUC | + |
| 1811 | 84146 | ZNF644 | intron_04 | chr1: 90982371-91020447 | chr1: 90993963-90993982 | AUUACAGUGGCCCCAAUCCU | + |
| 1812 | 84146 | ZNF644 | intron_04 | chr1: 90982371-91020447 | chr1: 90993950-90993969 | UUCUUACUCAACUAUUACAG | + |
| 1813 | 84146 | ZNF644 | intron_04 | chr1: 90982371-91020447 | chr1: 90993938-90993957 | AGUAAGAAUGUGUCCCUAUC | 1 |
| 1814 | 84146 | ZNF644 | intron_04 | chr1: 90982371-91020447 | chr1: 90993922-90993941 | GUAACCUUAAUUUCCAGAUA | + |
| 1815 | 84146 | ZNF644 | intron_04 | chr1: 90982371-91020447 | chr1: 90993747-90993766 | CAUUACUUACAAAAUGAUUU | − |
| 1816 | 84146 | ZNF644 | intron_04 | chr1: 90982371-91020447 | chr1: 90993627-90993646 | UUAACUUUUGAAGACAAGGG | + |
| 1817 | 84146 | ZNF644 | intron_04 | chr1: 90982371-91020447 | chr1: 90993625-90993644 | UCUUAACUUUUGAAGACAAG | + |
| 1818 | 84146 | ZNF644 | intron_04 | chr1: 90982371-91020447 | chr1: 90993623-90993642 | UCUCUUAACUUUUGAAGACA | + |
| 1819 | 84146 | ZNF644 | intron_04 | chr1: 90982371-91020447 | chr1: 90993571-90993590 | AAUAAGUUUUUCUUAGCCCU | + |
| 1820 | 84146 | ZNF644 | intron_04 | chr1: 90982371-91020447 | chr1: 90993312-90993331 | GCCAUCCUAGAUCAACCUUA | + |
| 1821 | 84146 | ZNF644 | intron_04 | chr1: 90982371-91020447 | chr1: 90993235-90993254 | CUCAUCUGCUUCAGAAUGGG | + |
| 1822 | 84146 | ZNF644 | intron_04 | chr1: 90982371-91020447 | chr1: 90993078-90993097 | CUCCCUGAUCUCUUAAAUCU | + |
| 1823 | 84146 | ZNF644 | intron_04 | chr1: 90982371-91020447 | chr1: 90992582-90992601 | UUGCAUAUAGAAAUUGGGGC | − |
| 1824 | 84146 | ZNF644 | intron_04 | chr1: 90982371-91020447 | chr1: 90992496-90992515 | CAUCAGGUCUGAUGAGAUUU | − |
| 1825 | 84146 | ZNF644 | intron_04 | chr1: 90982371-91020447 | chr1: 90992461-90992480 | UAGACUGAAUUACCAGUUGU | − |
| 1826 | 84146 | ZNF644 | intron_04 | chr1: 90982371-91020447 | chr1: 90992379-90992398 | UGGUUAUAAAUGAUUUUUUU | − |
| 1827 | 84146 | ZNF644 | intron_04 | chr1: 90982371-91020447 | chr1: 90992200-90992219 | CUUAUCUUGAAUGAUUUCAU | + |
| 1828 | 84146 | ZNF644 | intron_04 | chr1: 90982371-91020447 | chr1: 90992149-90992168 | GAAGAAUACCAACAGGCAUA | + |
| 1829 | 84146 | ZNF644 | intron_04 | chr1: 90982371-91020447 | chr1: 90992142-90992161 | CAAACAGGAAGAAUACCAAC | + |
| 1830 | 84146 | ZNF644 | intron_04 | chr1: 90982371-91020447 | chr1: 90992127-90992146 | CAUUCACUGUCUGGGCAAAC | + |
| 1831 | 84146 | ZNF644 | intron_04 | chr1: 90982371-91020447 | chr1: 90992119-90992138 | AAGCAGAUCAUUCACUGUCU | + |
| 1832 | 84146 | ZNF644 | intron_04 | chr1: 90982371-91020447 | chr1: 90991393-90991412 | CCUACUACAGGAUCCAGUCA | + |
| 1833 | 84146 | ZNF644 | intron_04 | chr1: 90982371-91020447 | chr1: 90991123-90991142 | GAAAAUUUGAAGCAGCACUU | + |
| 1834 | 84146 | ZNF644 | intron_04 | chr1: 90982371-91020447 | chr1: 90990917-90990936 | AAGAACUACAAAGUGGCACC | + |
| 1835 | 84146 | ZNF644 | intron_04 | chr1: 90982371-91020447 | chr1: 90990892-90990911 | ACCCCCAAAAAGGAACGUGG | + |
| 1836 | 84146 | ZNF644 | intron_04 | chr1: 90982371-91020447 | chr1: 90990720-90990739 | AGUCACCCAAAAGGAUGAAA | + |
| 1837 | 84146 | ZNF644 | intron_04 | chr1: 90982371-91020447 | chr1: 90990694-90990713 | GUGUGGAAACUAUCCAAGCA | + |
| 1838 | 84146 | ZNF644 | intron_04 | chr1: 90982371-91020447 | chr1: 90990562-90990581 | UGGUGGUAAUCCUUGAGUUG | + |
| 1839 | 84146 | ZNF644 | intron_04 | chr1: 90982371-91020447 | chr1: 90990545-90990564 | AGUAUCUAUGCAGAAUCUGG | + |
| 1840 | 84146 | ZNF644 | intron_04 | chr1: 90982371-91020447 | chr1: 90990542-90990561 | AAGAGUAUCUAUGCAGAAUC | + |
| 1841 | 84146 | ZNF644 | intron_04 | chr1: 90982371-91020447 | chr1: 90990449-90990468 | AGACAUUAGGCAACCCCUGA | + |
| 1842 | 84146 | ZNF644 | intron_04 | chr1: 90982371-91020447 | chr1: 90990355-90990374 | AAGAGCCAAGGUGGAGUAAC | + |
| 1843 | 84146 | ZNF644 | intron_04 | chr1: 90982371-91020447 | chr1: 90990131-90990150 | UGGAGUGGUUGUCAAAAUCU | + |
| 1844 | 84146 | ZNF644 | intron_04 | chr1: 90982371-91020447 | chr1: 90990130-90990149 | GUGGAGUGGUUGUCAAAAUC | + |
| 1845 | 84146 | ZNF644 | intron_04 | chr1: 90982371-91020447 | chr1: 90990019-90990038 | AUGAACCUCAAUCACCUCAA | + |
| 1846 | 84146 | ZNF644 | intron_04 | chr1: 90982371-91020447 | chr1: 90990018-90990037 | GAUGAACCUCAAUCACCUCA | + |
| 1847 | 84146 | ZNF644 | intron_04 | chr1: 90982371-91020447 | chr1: 90989696-90989715 | GGAACCCUUGGUGCACUGUU | + |
| 1848 | 84146 | ZNF644 | intron_04 | chr1: 90982371-91020447 | chr1: 90989196-90989215 | AAAUGGGCCAAGUACUUCAA | + |
| 1849 | 84146 | ZNF644 | intron_04 | chr1: 90982371-91020447 | chr1: 90988937-90988956 | GAAAACAUAGGGGAAGGCUU | + |
| 1850 | 84146 | ZNF644 | intron_04 | chr1: 90982371-91020447 | chr1: 90988769-90988788 | CAAUACUAUACAGAGAGGAA | + |
| 1851 | 84146 | ZNF644 | intron_04 | chr1: 90982371-91020447 | chr1: 90988730-90988749 | CCCAUGCAUUUCUAGUCAAA | + |
| 1852 | 84146 | ZNF644 | intron_04 | chr1: 90982371-91020447 | chr1: 90987504-90987523 | UAUAACUAGUAAACAGAGAU | + |
| 1853 | 84146 | ZNF644 | intron_04 | chr1: 90982371-91020447 | chr1: 90987453-90987472 | AAUGUACACCUAGCAAAACG | + |
| 1854 | 84146 | ZNF644 | intron_04 | chr1: 90982371-91020447 | chr1: 90987192-90987211 | UAAAUAUAGAACUGAAGACA | + |
| 1855 | 84146 | ZNF644 | intron_04 | chr1: 90982371-91020447 | chr1: 90987136-90987155 | UAAACCAAAUAGUAGCAGAA | + |
| 1856 | 84146 | ZNF644 | intron_04 | chr1: 90982371-91020447 | chr1: 90986910-90986929 | CUUACUCUUACCCAACCAAU | + |
| 1857 | 84146 | ZNF644 | intron_04 | chr1: 90982371-91020447 | chr1: 90986560-90986579 | GGAAGGGGUGGUUAGAAUAU | + |
| 1858 | 84146 | ZNF644 | intron_04 | chr1: 90982371-91020447 | chr1: 90986559-90986578 | UGGAAGGGGUGGUUAGAAUA | + |
| 1859 | 84146 | ZNF644 | intron_04 | chr1: 90982371-91020447 | chr1: 90986545-90986564 | GGAAAAAUGACAGUUGGAAG | + |
| 1860 | 84146 | ZNF644 | intron_04 | chr1: 90982371-91020447 | chr1: 90986539-90986558 | CAACAGGGAAAAAUGACAGU | + |
| 1861 | 84146 | ZNF644 | intron_04 | chr1: 90982371-91020447 | chr1: 90986358-90986377 | AACAAAGUCUUCAGAAACUU | + |
| 1862 | 84146 | ZNF644 | intron_04 | chr1: 90982371-91020447 | chr1: 90985908-90985927 | AUUCCUAACAAGGUACACAA | + |
| 1863 | 84146 | ZNF644 | intron_04 | chr1: 90982371-91020447 | chr1: 90985898-90985917 | UUUAUUUUGCAUUCCUAACA | + |
| 1864 | 84146 | ZNF644 | intron_04 | chr1: 90982371-91020447 | chr1: 90985533-90985552 | UACAUGUAAGUUAGAUUACG | + |
| 1865 | 84146 | ZNF644 | intron_04 | chr1: 90982371-91020447 | chr1: 90985136-90985155 | UGUCUAAAAUGUGCUGGUUU | − |
| 1866 | 84146 | ZNF644 | intron_04 | chr1: 90982371-91020447 | chr1: 90985129-90985148 | AAUGUGCUGGUUUAGGUUUG | − |
| 1867 | 84146 | ZNF644 | intron_04 | chr1: 90982371-91020447 | chr1: 90985128-90985147 | AUGUGCUGGUUUAGGUUUGU | − |
| 1868 | 84146 | ZNF644 | intron_04 | chr1: 90982371-91020447 | chr1: 90985127-90985146 | UGUGCUGGUUUAGGUUUGUG | − |
| 1869 | 84146 | ZNF644 | intron_04 | chr1: 90982371-91020447 | chr1: 90985108-90985127 | GGGGAACAAAUGCAGUUAAA | − |
| 1870 | 84146 | ZNF644 | intron_04 | chr1: 90982371-91020447 | chr1: 90984716-90984735 | ACAAGGUAUGCACACACAGA | + |
| 1871 | 84146 | ZNF644 | intron_04 | chr1: 90982371-91020447 | chr1: 90984242-90984261 | AAGUUCUCAAGGAGAUAAAC | + |
| 1872 | 84146 | ZNF644 | intron_04 | chr1: 90982371-91020447 | chr1: 90984027-90984046 | ACCAGUAUCAGGGAGAAGCA | + |
| 1873 | 84146 | ZNF644 | intron_04 | chr1: 90982371-91020447 | chr1: 90984017-90984036 | GCCAGCACCCACCAGUAUCA | + |
| 1874 | 84146 | ZNF644 | intron_04 | chr1: 90982371-91020447 | chr1: 90983313-90983332 | CACCAACCCAGAAGUGGACA | + |
| 1875 | 84146 | ZNF644 | intron_04 | chr1: 90982371-91020447 | chr1: 90983322-90983341 | AGGCCCCCAUGUCCACUUCU | − |
| 1876 | 84146 | ZNF644 | intron_04 | chr1: 90982371-91020447 | chr1: 90983318-90983337 | CCCCAUGUCCACUUCUGGGU | − |
| 1877 | 84146 | ZNF644 | intron_04 | chr1: 90982371-91020447 | chr1: 90983315-90983334 | CAUGUCCACUUCUGGGUUGG | − |
| 1878 | 84146 | ZNF644 | intron_04 | chr1: 90982371-91020447 | chr1: 90983155-90983174 | GAGAACAGAGGUAGGUGUGG | − |
| 1879 | 84146 | ZNF644 | intron_04 | chr1: 90982371-91020447 | chr1: 90983103-90983122 | AAGAGUCACAAGCUAGUUUC | − |
| 1880 | 84146 | ZNF644 | intron_04 | chr1: 90982371-91020447 | chr1: 90983093-90983112 | AGCUAGUUUCAGGUAUGGGG | − |
| 1881 | 84146 | ZNF644 | intron_04 | chr1: 90982371-91020447 | chr1: 90983072-90983091 | GGAGGAGAUAUGUAGAGUGU | − |
| 1882 | 84146 | ZNF644 | intron_04 | chr1: 90982371-91020447 | chr1: 90982983-90983002 | AUGCAUGUUCAGUGGAUUGU | − |
| 1883 | 84146 | ZNF644 | intron_04 | chr1: 90982371-91020447 | chr1: 90982851-90982870 | GGCUAUUAUGAUAAUUACUG | − |
| 1884 | 84146 | ZNF644 | intron_04 | chr1: 90982371-91020447 | chr1: 90982648-90982667 | UUUCAUUAAUUUUAAUAGUA | + |
| 1885 | 84146 | ZNF644 | intron_04 | chr1: 90982371-91020447 | chr1: 90982522-90982541 | UUUCCUAAAGAUUAAAAUGA | − |
| 1886 | 84146 | ZNF644 | intron_04 | chr1: 90982371-91020447 | chr1: 90982506-90982525 | AUGAUGGUAUUCUGGUUGAA | − |
| 1887 | 84146 | ZNF644 | intron_04 | chr1: 90982371-91020447 | chr1: 90982376-90982395 | AGAAAUACACACAAUGACCA | + |
| 1888 | 84146 | ZNF644 | intron_05 | chr1: 90973214-90982309 | chr1: 90982270-90982289 | UUAAAUGUACAUAUCAAGGU | − |
| 1889 | 84146 | ZNF644 | intron_05 | chr1: 90973214-90982309 | chr1: 90982136-90982155 | UUUACUCCCAUCAAAUCAAC | + |
| 1890 | 84146 | ZNF644 | intron_05 | chr1: 90973214-90982309 | chr1: 90982118-90982137 | AAAUUAUAACUAUCACAUUG | − |
| 1891 | 84146 | ZNF644 | intron_05 | chr1: 90973214-90982309 | chr1: 90982036-90982055 | UAACAUUUUAGAAUAUUCAC | + |
| 1892 | 84146 | ZNF644 | intron_05 | chr1: 90973214-90982309 | chr1: 90981865-90981884 | AAGGAAGCACUUUCCCAAAU | − |
| 1893 | 84146 | ZNF644 | intron_05 | chr1: 90973214-90982309 | chr1: 90981741-90981760 | AUCAGAAUGCUAUAUUAGAG | + |
| 1894 | 84146 | ZNF644 | intron_05 | chr1: 90973214-90982309 | chr1: 90981604-90981623 | UAUUUAUUGGUAAGUGAAUA | − |
| 1895 | 84146 | ZNF644 | intron_05 | chr1: 90973214-90982309 | chr1: 90981584-90981603 | UGGCUUCAAAAUGGAAACAA | − |
| 1896 | 84146 | ZNF644 | intron_05 | chr1: 90973214-90982309 | chr1: 90981512-90981531 | UUUUUGACAGCUGAAACAUC | + |
| 1897 | 84146 | ZNF644 | intron_05 | chr1: 90973214-90982309 | chr1: 90981436-90981455 | AGUUCAGUAAUAUGCACUGA | − |
| 1898 | 84146 | ZNF644 | intron_05 | chr1: 90973214-90982309 | chr1: 90981420-90981439 | CUGAAGGAAAUCUCAGUCAG | − |
| 1899 | 84146 | ZNF644 | intron_05 | chr1: 90973214-90982309 | chr1: 90981415-90981434 | GGAAAUCUCAGUCAGUGGUU | − |
| 1900 | 84146 | ZNF644 | intron_05 | chr1: 90973214-90982309 | chr1: 90981260-90981279 | UUUUUCUACACAACAAGAGG | + |
| 1901 | 84146 | ZNF644 | intron_05 | chr1: 90973214-90982309 | chr1: 90981159-90981178 | GCCUAUGUAUCUUCUUAAAG | − |
| 1902 | 84146 | ZNF644 | intron_05 | chr1: 90973214-90982309 | chr1: 90981130-90981149 | AGCCAUUCUUUUGUACUUGA | − |
| 1903 | 84146 | ZNF644 | intron_05 | chr1: 90973214-90982309 | chr1: 90981120-90981139 | UUGUACUUGAAGGUCUUAUU | − |
| 1904 | 84146 | ZNF644 | intron_05 | chr1: 90973214-90982309 | chr1: 90981044-90981063 | CUAUGUUUGAUAUUGCUUGU | − |
| 1905 | 84146 | ZNF644 | intron_05 | chr1: 90973214-90982309 | chr1: 90980816-90980835 | CUGGAAGCGGGGAAAGCACA | + |
| 1906 | 84146 | ZNF644 | intron_05 | chr1: 90973214-90982309 | chr1: 90980778-90980797 | UCAGAAAGAUGAUUACUUCA | + |
| 1907 | 84146 | ZNF644 | intron_05 | chr1: 90973214-90982309 | chr1: 90980516-90980535 | GUAUAAAAAAGUUAGCAAGU | + |
| 1908 | 84146 | ZNF644 | intron_05 | chr1: 90973214-90982309 | chr1: 90980477-90980496 | UGGGGGACAAUUAAAGAGAC | + |
| 1909 | 84146 | ZNF644 | intron_05 | chr1: 90973214-90982309 | chr1: 90980441-90980460 | AUGUAGUAAACCUUAUAACA | − |
| 1910 | 84146 | ZNF644 | intron_05 | chr1: 90973214-90982309 | chr1: 90980400-90980419 | UCAGCAUUCUGGCAUAGCUA | + |
| 1911 | 84146 | ZNF644 | intron_05 | chr1: 90973214-90982309 | chr1: 90980340-90980359 | AUGUACCUAGGACUAGAACU | + |
| 1912 | 84146 | ZNF644 | intron_05 | chr1: 90973214-90982309 | chr1: 90980328-90980347 | GAAAGUGACAACAUGUACCU | + |
| 1913 | 84146 | ZNF644 | intron_05 | chr1: 90973214-90982309 | chr1: 90980280-90980299 | ACAACUAGCAAAGAGGUCUC | + |
| 1914 | 84146 | ZNF644 | intron_05 | chr1: 90973214-90982309 | chr1: 90980273-90980292 | UAAGCUGACAACUAGCAAAG | + |
| 1915 | 84146 | ZNF644 | intron_05 | chr1: 90973214-90982309 | chr1: 90980052-90980071 | UAGAGAUUCAGAAUGCUAGC | − |
| 1916 | 84146 | ZNF644 | intron_05 | chr1: 90973214-90982309 | chr1: 90980046-90980065 | UUCAGAAUGCUAGCUGGAAU | − |
| 1917 | 84146 | ZNF644 | intron_05 | chr1: 90973214-90982309 | chr1: 90980041-90980060 | AAUGCUAGCUGGAAUGGGAU | − |
| 1918 | 84146 | ZNF644 | intron_05 | chr1: 90973214-90982309 | chr1: 90980040-90980059 | AUGCUAGCUGGAAUGGGAUG | − |
| 1919 | 84146 | ZNF644 | intron_05 | chr1: 90973214-90982309 | chr1: 90980039-90980058 | UGCUAGCUGGAAUGGGAUGG | − |
| 1920 | 84146 | ZNF644 | intron_05 | chr1: 90973214-90982309 | chr1: 90980015-90980034 | AUUGGCACUUGAGUUGCUGU | − |
| 1921 | 84146 | ZNF644 | intron_05 | chr1: 90973214-90982309 | chr1: 90979914-90979933 | AACUGGAUUGAAUGAAGACU | + |
| 1922 | 84146 | ZNF644 | intron_05 | chr1: 90973214-90982309 | chr1: 90979709-90979728 | ACUAAUACAAGUAGAAGAUU | − |
| 1923 | 84146 | ZNF644 | intron_05 | chr1: 90973214-90982309 | chr1: 90979558-90979577 | AUAGCAAGCUUCCUAAGCUG | + |
| 1924 | 84146 | ZNF644 | intron_05 | chr1: 90973214-90982309 | chr1: 90979130-90979149 | UUUUAAAGCAUUUUGACUAG | − |
| 1925 | 84146 | ZNF644 | intron_05 | chr1: 90973214-90982309 | chr1: 90979034-90979053 | CUAGAGGGCAAUCAAGCUUC | + |
| 1926 | 84146 | ZNF644 | intron_05 | chr1: 90973214-90982309 | chr1: 90979019-90979038 | CUUGCUUUGGACUUGCUAGA | + |
| 1927 | 84146 | ZNF644 | intron_05 | chr1: 90973214-90982309 | chr1: 90979018-90979037 | UCUUGCUUUGGACUUGCUAG | + |
| 1928 | 84146 | ZNF644 | intron_05 | chr1: 90973214-90982309 | chr1: 90979002-90979021 | AAGAAGAGGUUCUUCCCCAC | − |
| 1929 | 84146 | ZNF644 | intron_05 | chr1: 90973214-90982309 | chr1: 90978984-90979003 | AGCAACAAAUUGAUCCCUGU | + |
| 1930 | 84146 | ZNF644 | intron_05 | chr1: 90973214-90982309 | chr1: 90978983-90979002 | AAGCAACAAAUUGAUCCCUG | + |
| 1931 | 84146 | ZNF644 | intron_05 | chr1: 90973214-90982309 | chr1: 90978941-90978960 | AACUCUGUGUUCAAACAUUA | + |
| 1932 | 84146 | ZNF644 | intron_05 | chr1: 90973214-90982309 | chr1: 90978858-90978877 | UUCUUACCGUAUAUAGACCU | − |
| 1933 | 84146 | ZNF644 | intron_05 | chr1: 90973214-90982309 | chr1: 90978810-90978829 | ACUAAACACACUUCACAAUC | + |
| 1934 | 84146 | ZNF644 | intron_05 | chr1: 90973214-90982309 | chr1: 90978737-90978756 | UUUGUGGAGACAUGUAAGUU | + |
| 1935 | 84146 | ZNF644 | intron_05 | chr1: 90973214-90982309 | chr1: 90978673-90978692 | AGACGAAGACUCUGCAACGG | + |
| 1936 | 84146 | ZNF644 | intron_05 | chr1: 90973214-90982309 | chr1: 90978670-90978689 | UGAAGACGAAGACUCUGCAA | + |
| 1937 | 84146 | ZNF644 | intron_05 | chr1: 90973214-90982309 | chr1: 90978589-90978608 | CAUAAAGAAUUUCAAAUCCU | + |
| 1938 | 84146 | ZNF644 | intron_05 | chr1: 90973214-90982309 | chr1: 90978481-90978500 | UCUUUUUCAUGCUACAACAA | + |
| 1939 | 84146 | ZNF644 | intron_05 | chr1: 90973214-90982309 | chr1: 90977925-90977944 | CAGCUAUUUUUGGUAACUUA | + |
| 1940 | 84146 | ZNF644 | intron_05 | chr1: 90973214-90982309 | chr1: 90977672-90977691 | UUUAUUACAUCAGAAGUUAA | + |
| 1941 | 84146 | ZNF644 | intron_05 | chr1: 90973214-90982309 | chr1: 90977401-90977420 | CACAAAGGUAUGUUAAUUGA | + |
| 1942 | 84146 | ZNF644 | intron_05 | chr1: 90973214-90982309 | chr1: 90977317-90977336 | AUCCUAAAAAAAUAGUAUGA | + |
| 1943 | 84146 | ZNF644 | intron_05 | chr1: 90973214-90982309 | chr1: 90977212-90977231 | AUGAACCUAAUAUUUAGUAA | + |
| 1944 | 84146 | ZNF644 | intron_05 | chr1: 90973214-90982309 | chr1: 90976859-90976878 | AUAGUACUUUAAACAUAUCU | + |
| 1945 | 84146 | ZNF644 | intron_05 | chr1: 90973214-90982309 | chr1: 90976769-90976788 | UUGACCCUUCAUAUCUGAAG | + |
| 1946 | 84146 | ZNF644 | intron_05 | chr1: 90973214-90982309 | chr1: 90976768-90976787 | GUUGACCCUUCAUAUCUGAA | + |
| 1947 | 84146 | ZNF644 | intron_05 | chr1: 90973214-90982309 | chr1: 90976724-90976743 | CAUCUCUUAAAACUCACCCU | − |
| 1948 | 84146 | ZNF644 | intron_05 | chr1: 90973214-90982309 | chr1: 90976705-90976724 | UAACAGCACAGUGAAACCAA | + |
| 1949 | 84146 | ZNF644 | intron_05 | chr1: 90973214-90982309 | chr1: 90976693-90976712 | UGCUGUUAAAUUUGUUUAAA | − |
| 1950 | 84146 | ZNF644 | intron_05 | chr1: 90973214-90982309 | chr1: 90976607-90976626 | UUUUAUACUAAAGACAAGCA | + |
| 1951 | 84146 | ZNF644 | intron_05 | chr1: 90973214-90982309 | chr1: 90976554-90976573 | UUUGCCGCUUAGCCUUUGUU | + |
| 1952 | 84146 | ZNF644 | intron_05 | chr1: 90973214-90982309 | chr1: 90976534-90976553 | UAUCAUUCCAAUAUGUGAAC | − |
| 1953 | 84146 | ZNF644 | intron_05 | chr1: 90973214-90982309 | chr1: 90976393-90976412 | AGAAUAUUAGAUUUCAAUAA | + |
| 1954 | 84146 | ZNF644 | intron_05 | chr1: 90973214-90982309 | chr1: 90976327-90976346 | AUAACUAGUUGCAUGGUACU | + |
| 1955 | 84146 | ZNF644 | intron_05 | chr1: 90973214-90982309 | chr1: 90976320-90976339 | UUGUACUAUAACUAGUUGCA | + |
| 1956 | 84146 | ZNF644 | intron_05 | chr1: 90973214-90982309 | chr1: 90976279-90976298 | UACACUAUACUACUCAGACU | + |
| 1957 | 84146 | ZNF644 | intron_05 | chr1: 90973214-90982309 | chr1: 90976248-90976267 | UCCUUAAAAACGUCCUCCUC | + |
| 1958 | 84146 | ZNF644 | intron_05 | chr1: 90973214-90982309 | chr1: 90976024-90976043 | UUCACAUUUUACCACAGCUU | − |
| 1959 | 84146 | ZNF644 | intron_05 | chr1: 90973214-90982309 | chr1: 90975977-90975996 | CAGUUUGAAAAAAUAGCACA | + |
| 1960 | 84146 | ZNF644 | intron_05 | chr1: 90973214-90982309 | chr1: 90975741-90975760 | GCCUCAAAUAUCUACUUUAA | + |
| 1961 | 84146 | ZNF644 | intron_05 | chr1: 90973214-90982309 | chr1: 90975745-90975764 | ACCAUUAAAGUAGAUAUUUG | − |
| 1962 | 84146 | ZNF644 | intron_05 | chr1: 90973214-90982309 | chr1: 90975417-90975436 | GUAGAUAUUUGAAACUUUUA | − |
| 1963 | 84146 | ZNF644 | intron_05 | chr1: 90973214-90982309 | chr1: 90975371-90975390 | ACAAAAAUUUACUGAGCCCA | + |
| 1964 | 84146 | ZNF644 | intron_05 | chr1: 90973214-90982309 | chr1: 90975335-90975354 | UCAUCUGAUGUUUUAUGAAU | − |
| 1965 | 84146 | ZNF644 | intron_05 | chr1: 90973214-90982309 | chr1: 90974009-90974028 | CUUCUCUCCUAAAACUUUUA | + |
| 1966 | 84146 | ZNF644 | intron_05 | chr1: 90973214-90982309 | chr1: 90974019-90974038 | ACCUAUCCCAUAAAAGUUUU | − |
| 1967 | 84146 | ZNF644 | intron_05 | chr1: 90973214-90982309 | chr1: 90973726-90973745 | UCAUCUAUAGAGGGCACUGC | + |
| 1968 | 84146 | ZNF644 | intron_05 | chr1: 90973214-90982309 | chr1: 90973704-90973723 | GGCUCUUCUAUUUUUUAAAC | − |
| 1969 | 84146 | ZNF644 | intron_05 | chr1: 90973214-90982309 | chr1: 90973306-90973325 | UAACAUAAGAAAUACUACAC | − |
| 1970 | 84146 | ZNF644 | intron_05 | chr1: 90973214-90982309 | chr1: 90973236-90973255 | UGAGAGUAUAAUACAUAAAU | + |
| 1971 | 84146 | ZNF644 | exon_06_nc.1 | chr1: 90973153-90973213 | chr1: 90973174-90973193 | CAAUAAAUAACAAAUAUGUC | + |
| 1972 | 84146 | ZNF644 | exon_06_nc.1 | chr1: 90973153-90973213 | chr1: 90973144-90973163 | AAAAAUUACCAAUGGGGAUG | + |
| 1973 | 84146 | ZNF644 | exon_06_nc.1 | chr1: 90973153-90973213 | chr1: 90973155-90973174 | GAUCUCCACCUCAUCCCCAU | − |
| 1974 | 84146 | ZNF644 | exon_06_nc.2 | chr1: 90972744-90973152 | chr1: 90972940-90972959 | CUCAGGAGCAGGAGAAACGG | + |
| 1975 | 84146 | ZNF644 | exon_06_nc.2 | chr1: 90972744-90973152 | chr1: 90972937-90972956 | GACCUCAGGAGCAGGAGAAA | + |
| 1976 | 84146 | ZNF644 | intron_06 | chr1: 90941310-90972743 | chr1: 90972229-90972248 | GCAAAUCAUGUUAUCUAACA | + |
| 1977 | 84146 | ZNF644 | intron_06 | chr1: 90941310-90972743 | chr1: 90971861-90971880 | GAAAUGAUGAAAAAAGGGCC | − |
| 1978 | 84146 | ZNF644 | intron_06 | chr1: 90941310-90972743 | chr1: 90971840-90971859 | CUUUCAAUCAGAUAGAAACC | + |
| 1979 | 84146 | ZNF644 | intron_06 | chr1: 90941310-90972743 | chr1: 90971758-90971777 | AGCCAGAGCACUUAGGGGAG | + |
| 1980 | 84146 | ZNF644 | intron_06 | chr1: 90941310-90972743 | chr1: 90971757-90971776 | UAGCCAGAGCACUUAGGGGA | + |
| 1981 | 84146 | ZNF644 | intron_06 | chr1: 90941310-90972743 | chr1: 90971756-90971775 | CUAGCCAGAGCACUUAGGGG | + |
| 1982 | 84146 | ZNF644 | intron_06 | chr1: 90941310-90972743 | chr1: 90971753-90971772 | UUCCUAGCCAGAGCACUUAG | + |
| 1983 | 84146 | ZNF644 | intron_06 | chr1: 90941310-90972743 | chr1: 90970573-90970592 | AAUUCCAAUCUAAAUGACUC | + |
| 1984 | 84146 | ZNF644 | intron_06 | chr1: 90941310-90972743 | chr1: 90970361-90970380 | AGCUGUGCUUCAGAUAAACU | + |
| 1985 | 84146 | ZNF644 | intron_06 | chr1: 90941310-90972743 | chr1: 90970254-90970273 | CAAUAGAAAACCUGUAUUCA | + |
| 1986 | 84146 | ZNF644 | intron_06 | chr1: 90941310-90972743 | chr1: 90969822-90969841 | GAGGUUUUCGCAUCCACUGG | + |
| 1987 | 84146 | ZNF644 | intron_06 | chr1: 90941310-90972743 | chr1: 90968924-90968943 | UAGAAUGUAAUAACAAGAUG | − |
| 1988 | 84146 | ZNF644 | intron_06 | chr1: 90941310-90972743 | chr1: 90968874-90968893 | GUUUGCUGUGGCAAGUAAAU | − |
| 1989 | 84146 | ZNF644 | intron_06 | chr1: 90941310-90972743 | chr1: 90968751-90968770 | UUCUUUUCCUGAAUACUUUA | + |
| 1990 | 84146 | ZNF644 | intron_06 | chr1: 90941310-90972743 | chr1: 90968761-90968780 | AAGGUAUCCUUAAAGUAUUC | − |
| 1991 | 84146 | ZNF644 | intron_06 | chr1: 90941310-90972743 | chr1: 90968413-90968432 | CUAAUAUAUUUCGGUUUUGG | + |
| 1992 | 84146 | ZNF644 | intron_06 | chr1: 90941310-90972743 | chr1: 90968412-90968431 | UCUAAUAUAUUUCGGUUUUG | + |
| 1993 | 84146 | ZNF644 | intron_06 | chr1: 90941310-90972743 | chr1: 90968411-90968430 | UUCUAAUAUAUUUCGGUUUU | + |
| 1994 | 84146 | ZNF644 | intron_06 | chr1: 90941310-90972743 | chr1: 90968322-90968341 | GUCAAAAUAUAGUAUUGCAU | + |
| 1995 | 84146 | ZNF644 | intron_06 | chr1: 90941310-90972743 | chr1: 90968295-90968314 | UAUUGUAAAUUAUAUCUCAU | − |
| 1996 | 84146 | ZNF644 | intron_06 | chr1: 90941310-90972743 | chr1: 90968248-90968267 | AUCAGUACAUUUACAUACCU | − |
| 1997 | 84146 | ZNF644 | intron_06 | chr1: 90941310-90972743 | chr1: 90968206-90968225 | GUUAUUUUGUAGGAAUUUGC | + |
| 1998 | 84146 | ZNF644 | intron_06 | chr1: 90941310-90972743 | chr1: 90968198-90968217 | CUACAAAAUAACUGAUCAUG | − |
| 1999 | 84146 | ZNF644 | intron_06 | chr1: 90941310-90972743 | chr1: 90968163-90968182 | GUAUAUCACUAAUUGAGAUA | − |
| 2000 | 84146 | ZNF644 | intron_06 | chr1: 90941310-90972743 | chr1: 90967735-90967754 | UCUUUUUGUGCACUCACUGG | − |
| 2001 | 84146 | ZNF644 | intron_06 | chr1: 90941310-90972743 | chr1: 90967729-90967748 | UGUGCACUCACUGGUGGCUA | − |
| 2002 | 84146 | ZNF644 | intron_06 | chr1: 90941310-90972743 | chr1: 90967728-90967747 | GUGCACUCACUGGUGGCUAG | − |
| 2003 | 84146 | ZNF644 | intron_06 | chr1: 90941310-90972743 | chr1: 90967724-90967743 | ACUCACUGGUGGCUAGGGGC | − |
| 2004 | 84146 | ZNF644 | intron_06 | chr1: 90941310-90972743 | chr1: 90967671-90967690 | AACCAGUUGAAGUUAAUAAA | − |
| 2005 | 84146 | ZNF644 | intron_06 | chr1: 90941310-90972743 | chr1: 90967625-90967644 | CCCUGAUAUCAGUCAAUUAU | + |
| 2006 | 84146 | ZNF644 | intron_06 | chr1: 90941310-90972743 | chr1: 90967628-90967647 | CCUAUAAUUGACUGAUAUCA | − |
| 2007 | 84146 | ZNF644 | intron_06 | chr1: 90941310-90972743 | chr1: 90967580-90967599 | GUUGUCUGUGUUCCUUCAUU | − |
| 2008 | 84146 | ZNF644 | intron_06 | chr1: 90941310-90972743 | chr1: 90967544-90967563 | UGCUGUUUUGAACAACUAAA | + |
| 2009 | 84146 | ZNF644 | intron_06 | chr1: 90941310-90972743 | chr1: 90967509-90967528 | AGCAUAUGCAAUAGAAGACA | − |
| 2010 | 84146 | ZNF644 | intron_06 | chr1: 90941310-90972743 | chr1: 90967484-90967503 | CCCAUUCUCUUGGAAUCACA | − |
| 2011 | 84146 | ZNF644 | intron_06 | chr1: 90941310-90972743 | chr1: 90967442-90967461 | UUUUGGAACUUAGGACCAUU | − |
| 2012 | 84146 | ZNF644 | intron_06 | chr1: 90941310-90972743 | chr1: 90967364-90967383 | UGACAAAUGCUCUUACAGAA | + |
| 2013 | 84146 | ZNF644 | intron_06 | chr1: 90941310-90972743 | chr1: 90967346-90967365 | CAAAGGAACUUGACACAGAG | − |
| 2014 | 84146 | ZNF644 | intron_06 | chr1: 90941310-90972743 | chr1: 90967191-90967210 | ACAUGUUCCUCUUCACCAUA | + |
| 2015 | 84146 | ZNF644 | intron_06 | chr1: 90941310-90972743 | chr1: 90967071-90967090 | AAUCUUUUAUACAGUUGAAA | + |
| 2016 | 84146 | ZNF644 | intron_06 | chr1: 90941310-90972743 | chr1: 90966987-90967006 | CUAAUCAUUUUCUGCACCAC | + |
| 2017 | 84146 | ZNF644 | intron_06 | chr1: 90941310-90972743 | chr1: 90966853-90966872 | UCACGUGAUAGGAGCACUUU | + |
| 2018 | 84146 | ZNF644 | intron_06 | chr1: 90941310-90972743 | chr1: 90966852-90966871 | CUCACGUGAUAGGAGCACUU | + |
| 2019 | 84146 | ZNF644 | intron_06 | chr1: 90941310-90972743 | chr1: 90966086-90966105 | ACUAUUUCUCGACUAUGCUC | + |
| 2020 | 84146 | ZNF644 | intron_06 | chr1: 90941310-90972743 | chr1: 90965481-90965500 | AGUCUGAAGUAGAGGCGGAC | + |
| 2021 | 84146 | ZNF644 | intron_06 | chr1: 90941310-90972743 | chr1: 90965280-90965299 | AUCUGUUUCAGAUUUCUUCU | + |
| 2022 | 84146 | ZNF644 | intron_06 | chr1: 90941310-90972743 | chr1: 90965159-90965178 | UAACAAAGUCCUGCAAGUGG | + |
| 2023 | 84146 | ZNF644 | intron_06 | chr1: 90941310-90972743 | chr1: 90965156-90965175 | UUUUAACAAAGUCCUGCAAG | + |
| 2024 | 84146 | ZNF644 | intron_06 | chr1: 90941310-90972743 | chr1: 90964945-90964964 | AAAGCAACUUAUGUCUUCUA | − |
| 2025 | 84146 | ZNF644 | intron_06 | chr1: 90941310-90972743 | chr1: 90964785-90964804 | AUAGAAGAGGUCUUUUUUUU | + |
| 2026 | 84146 | ZNF644 | intron_06 | chr1: 90941310-90972743 | chr1: 90964694-90964713 | GCUAUACUGGAAUAUUAUAC | + |
| 2027 | 84146 | ZNF644 | intron_06 | chr1: 90941310-90972743 | chr1: 90964394-90964413 | UUUUGAUAGAAACCUCCUUU | − |
| 2028 | 84146 | ZNF644 | intron_06 | chr1: 90941310-90972743 | chr1: 90964337-90964356 | UUCUCACAUUUAGACAAAGA | + |
| 2029 | 84146 | ZNF644 | intron_06 | chr1: 90941310-90972743 | chr1: 90963978-90963997 | GUGUAAUGUAUUGUUUUCUA | − |
| 2030 | 84146 | ZNF644 | intron_06 | chr1: 90941310-90972743 | chr1: 90963848-90963867 | GUCAUGGAGUGUUUACUUUG | + |
| 2031 | 84146 | ZNF644 | intron_06 | chr1: 90941310-90972743 | chr1: 90963798-90963817 | AUAGGGGGUUUCUGGGUUGC | + |
| 2032 | 84146 | ZNF644 | intron_06 | chr1: 90941310-90972743 | chr1: 90963791-90963810 | AAGAGACAUAGGGGGUUUCU | + |
| 2033 | 84146 | ZNF644 | intron_06 | chr1: 90941310-90972743 | chr1: 90963739-90963758 | GUCAGGCAAGUGGUUAACCU | + |
| 2034 | 84146 | ZNF644 | intron_06 | chr1: 90941310-90972743 | chr1: 90963738-90963757 | AGUCAGGCAAGUGGUUAACC | + |
| 2035 | 84146 | ZNF644 | intron_06 | chr1: 90941310-90972743 | chr1: 90963566-90963585 | AUUUGUCAUGUUACUGUAGG | − |
| 2036 | 84146 | ZNF644 | intron_06 | chr1: 90941310-90972743 | chr1: 90963561-90963580 | UCAUGUUACUGUAGGAGGUU | − |
| 2037 | 84146 | ZNF644 | intron_06 | chr1: 90941310-90972743 | chr1: 90963560-90963579 | CAUGUUACUGUAGGAGGUUU | − |
| 2038 | 84146 | ZNF644 | intron_06 | chr1: 90941310-90972743 | chr1: 90963460-90963479 | AAUGACCCAGAUUCUAGUCU | + |
| 2039 | 84146 | ZNF644 | intron_06 | chr1: 90941310-90972743 | chr1: 90963304-90963323 | UCAGAAGACUAAAAUUAAAG | + |
| 2040 | 84146 | ZNF644 | intron_06 | chr1: 90941310-90972743 | chr1: 90963263-90963282 | AAAGGGUAUUCAAUUCCAUU | + |
| 2041 | 84146 | ZNF644 | intron_06 | chr1: 90941310-90972743 | chr1: 90962834-90962853 | AAACUAUGCUUCUCUACUAG | − |
| 2042 | 84146 | ZNF644 | intron_06 | chr1: 90941310-90972743 | chr1: 90962803-90962822 | AGAUGUGUGGUUAGAGAGGA | + |
| 2043 | 84146 | ZNF644 | intron_06 | chr1: 90941310-90972743 | chr1: 90962799-90962818 | UGGGAGAUGUGUGGUUAGAG | + |
| 2044 | 84146 | ZNF644 | intron_06 | chr1: 90941310-90972743 | chr1: 90962779-90962798 | CAAAUGUCCCACCCAGAUGG | + |
| 2045 | 84146 | ZNF644 | intron_06 | chr1: 90941310-90972743 | chr1: 90962790-90962809 | CACAUCUCCCACCAUCUGGG | − |
| 2046 | 84146 | ZNF644 | intron_06 | chr1: 90941310-90972743 | chr1: 90962789-90962808 | ACAUCUCCCACCAUCUGGGU | − |
| 2047 | 84146 | ZNF644 | intron_06 | chr1: 90941310-90972743 | chr1: 90962667-90962686 | CUUAGCAUUCUGUACAUUGU | + |
| 2048 | 84146 | ZNF644 | intron_06 | chr1: 90941310-90972743 | chr1: 90962440-90962459 | AUACAUUCACAUGUAAGAAA | + |
| 2049 | 84146 | ZNF644 | intron_06 | chr1: 90941310-90972743 | chr1: 90962301-90962320 | AGACAAAAGUAGACCAAUGG | + |
| 2050 | 84146 | ZNF644 | intron_06 | chr1: 90941310-90972743 | chr1: 90962298-90962317 | GAUAGACAAAAGUAGACCAA | + |
| 2051 | 84146 | ZNF644 | intron_06 | chr1: 90941310-90972743 | chr1: 90962173-90962192 | CUGAUAUGAAUAAAAAUUUA | + |
| 2052 | 84146 | ZNF644 | intron_06 | chr1: 90941310-90972743 | chr1: 90962067-90962086 | GUCUGAGUGAGCUAAAUAAA | + |
| 2053 | 84146 | ZNF644 | intron_06 | chr1: 90941310-90972743 | chr1: 90961918-90961937 | CCACUGAACAGAAAAUUAUC | + |
| 2054 | 84146 | ZNF644 | intron_06 | chr1: 90941310-90972743 | chr1: 90961833-90961852 | UCACACUGGGUAAGUACUAC | + |
| 2055 | 84146 | ZNF644 | intron_06 | chr1: 90941310-90972743 | chr1: 90961771-90961790 | CAGUAAAUAUUGUUCUCAAC | + |
| 2056 | 84146 | ZNF644 | intron_06 | chr1: 90941310-90972743 | chr1: 90961394-90961413 | UGUGAGUUGUGGGGCCCAGG | + |
| 2057 | 84146 | ZNF644 | intron_06 | chr1: 90941310-90972743 | chr1: 90961392-90961411 | AGUGUGAGUUGUGGGGCCCA | + |
| 2058 | 84146 | ZNF644 | intron_06 | chr1: 90941310-90972743 | chr1: 90961391-90961410 | AAGUGUGAGUUGUGGGGCCC | + |
| 2059 | 84146 | ZNF644 | intron_06 | chr1: 90941310-90972743 | chr1: 90961385-90961404 | UCUGAAAAGUGUGAGUUGUG | + |
| 2060 | 84146 | ZNF644 | intron_06 | chr1: 90941310-90972743 | chr1: 90961384-90961403 | GUCUGAAAAGUGUGAGUUGU | + |
| 2061 | 84146 | ZNF644 | intron_06 | chr1: 90941310-90972743 | chr1: 90961383-90961402 | GGUCUGAAAAGUGUGAGUUG | + |
| 2062 | 84146 | ZNF644 | intron_06 | chr1: 90941310-90972743 | chr1: 90961362-90961381 | GCUGUGAUCUCUAGGACAUG | + |
| 2063 | 84146 | ZNF644 | intron_06 | chr1: 90941310-90972743 | chr1: 90961201-90961220 | GUUGAGUAAGGGGUACAGUA | + |
| 2064 | 84146 | ZNF644 | intron_06 | chr1: 90941310-90972743 | chr1: 90961078-90961097 | AGAAUAAAAAGCGAUACAAG | + |
| 2065 | 84146 | ZNF644 | intron_06 | chr1: 90941310-90972743 | chr1: 90960797-90960816 | UUGCUAGUCUUUUUGGAUGG | + |
| 2066 | 84146 | ZNF644 | intron_06 | chr1: 90941310-90972743 | chr1: 90960790-90960809 | GGUGUUCUUGCUAGUCUUUU | + |
| 2067 | 84146 | ZNF644 | intron_06 | chr1: 90941310-90972743 | chr1: 90960769-90960788 | UAAAAAAUGUGCUCAACUAC | + |
| 2068 | 84146 | ZNF644 | intron_06 | chr1: 90941310-90972743 | chr1: 90960341-90960360 | GUGGUGCAUUUUAAGAGCUU | + |
| 2069 | 84146 | ZNF644 | intron_06 | chr1: 90941310-90972743 | chr1: 90960254-90960273 | AAAUCUUCUACUCGCUGAAU | + |
| 2070 | 84146 | ZNF644 | intron_06 | chr1: 90941310-90972743 | chr1: 90959775-90959794 | UUUAGAAACUAGAGAGCUAG | + |
| 2071 | 84146 | ZNF644 | intron_06 | chr1: 90941310-90972743 | chr1: 90959692-90959711 | UUACUUUACCAGGUGAUGGA | + |
| 2072 | 84146 | ZNF644 | intron_06 | chr1: 90941310-90972743 | chr1: 90959688-90959707 | AAGGUUACUUUACCAGGUGA | + |
| 2073 | 84146 | ZNF644 | intron_06 | chr1: 90941310-90972743 | chr1: 90958861-90958880 | AGCUCUCAGAAGGCAUGGGU | + |
| 2074 | 84146 | ZNF644 | intron_06 | chr1: 90941310-90972743 | chr1: 90957182-90957201 | CCAGGACUAUGCGGUUUCAC | + |
| 2075 | 84146 | ZNF644 | intron_06 | chr1: 90941310-90972743 | chr1: 90956942-90956961 | UGAAAAAUCAGGAAUAGAAG | + |
| 2076 | 84146 | ZNF644 | intron_06 | chr1: 90941310-90972743 | chr1: 90956605-90956624 | CCAUCUCACUUUAUGCCUUA | + |
| 2077 | 84146 | ZNF644 | intron_06 | chr1: 90941310-90972743 | chr1: 90956456-90956475 | ACAGAUGAGAUUUAGUAUGA | + |
| 2078 | 84146 | ZNF644 | intron_06 | chr1: 90941310-90972743 | chr1: 90956456-90956475 | UCAUACUAAAUCUCAUCUGU | − |
| 2079 | 84146 | ZNF644 | intron_06 | chr1: 90941310-90972743 | chr1: 90956455-90956474 | CAUACUAAAUCUCAUCUGUG | − |
| 2080 | 84146 | ZNF644 | intron_06 | chr1: 90941310-90972743 | chr1: 90956151-90956170 | CUUGGAUUGGGCAUGGUUUG | + |
| 2081 | 84146 | ZNF644 | intron_06 | chr1: 90941310-90972743 | chr1: 90956144-90956163 | UCACUAUCUUGGAUUGGGCA | + |
| 2082 | 84146 | ZNF644 | intron_06 | chr1: 90941310-90972743 | chr1: 90956133-90956152 | AUCAAUUCAGUUCACUAUCU | + |
| 2083 | 84146 | ZNF644 | intron_06 | chr1: 90941310-90972743 | chr1: 90955856-90955875 | CAAACUUGGCUAAAUGUUUG | + |
| 2084 | 84146 | ZNF644 | intron_06 | chr1: 90941310-90972743 | chr1: 90955446-90955465 | AUCUACACUGAAAAAUCUGU | + |
| 2085 | 84146 | ZNF644 | intron_06 | chr1: 90941310-90972743 | chr1: 90955341-90955360 | AGAGGGUCCGCCUGUCUCUC | + |
| 2086 | 84146 | ZNF644 | intron_06 | chr1: 90941310-90972743 | chr1: 90954981-90955000 | AAAUGUACUUAGUGACUUCA | + |
| 2087 | 84146 | ZNF644 | intron_06 | chr1: 90941310-90972743 | chr1: 90953375-90953394 | CCUAUGGGGUAGGGGGUGAA | + |
| 2088 | 84146 | ZNF644 | intron_06 | chr1: 90941310-90972743 | chr1: 90953350-90953369 | ACAUGGAGAGGGGAACACAC | + |
| 2089 | 84146 | ZNF644 | intron_06 | chr1: 90941310-90972743 | chr1: 90953340-90953359 | CAUUUAACAGACAUGGAGAG | + |
| 2090 | 84146 | ZNF644 | intron_06 | chr1: 90941310-90972743 | chr1: 90953201-90953220 | UCACCUUCUUUACCAAUUAC | + |
| 2091 | 84146 | ZNF644 | intron_06 | chr1: 90941310-90972743 | chr1: 90952896-90952915 | ACUACACUUAGAUACAUCAC | + |
| 2092 | 84146 | ZNF644 | intron_06 | chr1: 90941310-90972743 | chr1: 90952742-90952761 | CCAACAUCUAGUUGGAAUCC | + |
| 2093 | 84146 | ZNF644 | intron_06 | chr1: 90941310-90972743 | chr1: 90952648-90952667 | AGUAUAUUGAAUGAAGCAAG | + |
| 2094 | 84146 | ZNF644 | intron_06 | chr1: 90941310-90972743 | chr1: 90952553-90952572 | UCACUGUAGACCAUAUGCUC | + |
| 2095 | 84146 | ZNF644 | intron_06 | chr1: 90941310-90972743 | chr1: 90952424-90952443 | AGACCACUGAUCAAACAUAU | + |
| 2096 | 84146 | ZNF644 | intron_06 | chr1: 90941310-90972743 | chr1: 90952168-90952187 | UUACUGACAAAGGGUCACCU | + |
| 2097 | 84146 | ZNF644 | intron_06 | chr1: 90941310-90972743 | chr1: 90952159-90952178 | AAGCCAUUUUUACUGACAAA | + |
| 2098 | 84146 | ZNF644 | intron_06 | chr1: 90941310-90972743 | chr1: 90952084-90952103 | CUGAAUUUUAAUUCUAAGAC | − |
| 2099 | 84146 | ZNF644 | intron_06 | chr1: 90941310-90972743 | chr1: 90951946-90951965 | AUUGCAGCAAAGCACAUAAU | + |
| 2100 | 84146 | ZNF644 | intron_06 | chr1: 90941310-90972743 | chr1: 90951947-90951966 | UAUUAUGUGCUUUGCUGCAA | − |
| 2101 | 84146 | ZNF644 | intron_06 | chr1: 90941310-90972743 | chr1: 90951921-90951940 | GAGCUCCUUAGGCAGACAGA | + |
| 2102 | 84146 | ZNF644 | intron_06 | chr1: 90941310-90972743 | chr1: 90951806-90951825 | UUGCUAACUGAAUACCUCAA | + |
| 2103 | 84146 | ZNF644 | intron_06 | chr1: 90941310-90972743 | chr1: 90951527-90951546 | CAUGGCAAACUAUUUCAUCU | + |
| 2104 | 84146 | ZNF644 | intron_06 | chr1: 90941310-90972743 | chr1: 90951480-90951499 | AGCAUUGACUAUUCCUCAGA | + |
| 2105 | 84146 | ZNF644 | intron_06 | chr1: 90941310-90972743 | chr1: 90951153-90951172 | ACUUCAUCAGCUGACUAAUC | + |
| 2106 | 84146 | ZNF644 | intron_06 | chr1: 90941310-90972743 | chr1: 90950967-90950986 | AAGGCUGCUAGAUAUGUGUU | − |
| 2107 | 84146 | ZNF644 | intron_06 | chr1: 90941310-90972743 | chr1: 90950966-90950985 | AGGCUGCUAGAUAUGUGUUU | − |
| 2108 | 84146 | ZNF644 | intron_06 | chr1: 90941310-90972743 | chr1: 90950857-90950876 | CUCUUUCCCUAAAAUUGAUC | + |
| 2109 | 84146 | ZNF644 | intron_06 | chr1: 90941310-90972743 | chr1: 90950628-90950647 | AAAUCAACAGCCACAGAGGG | + |
| 2110 | 84146 | ZNF644 | intron_06 | chr1: 90941310-90972743 | chr1: 90949950-90949969 | AUGAACAACAAAAAGGAUUC | − |
| 2111 | 84146 | ZNF644 | intron_06 | chr1: 90941310-90972743 | chr1: 90949945-90949964 | CAACAAAAAGGAUUCAGGAA | − |
| 2112 | 84146 | ZNF644 | intron_06 | chr1: 90941310-90972743 | chr1: 90949938-90949957 | AAGGAUUCAGGAACGGUGUU | − |
| 2113 | 84146 | ZNF644 | intron_06 | chr1: 90941310-90972743 | chr1: 90949893-90949912 | GGAUUCCCAGUAUGUGGCUA | + |
| 2114 | 84146 | ZNF644 | intron_06 | chr1: 90941310-90972743 | chr1: 90949781-90949800 | UGGAGUUUGGUAUUCUUGCA | + |
| 2115 | 84146 | ZNF644 | intron_06 | chr1: 90941310-90972743 | chr1: 90949659-90949678 | UUUGGCAUUUACACUGUAGU | + |
| 2116 | 84146 | ZNF644 | intron_06 | chr1: 90941310-90972743 | chr1: 90949533-90949552 | AAUAUACUUGGCUCUCUCUG | + |
| 2117 | 84146 | ZNF644 | intron_06 | chr1: 90941310-90972743 | chr1: 90949427-90949446 | ACAAGUAUCUUAAUUUAGGA | + |
| 2118 | 84146 | ZNF644 | intron_06 | chr1: 90941310-90972743 | chr1: 90949375-90949394 | GAUGAUAAUUGGAUUUUUUC | − |
| 2119 | 84146 | ZNF644 | intron_06 | chr1: 90941310-90972743 | chr1: 90949057-90949076 | UUUACAAUUUAAUCUAUUGA | + |
| 2120 | 84146 | ZNF644 | intron_06 | chr1: 90941310-90972743 | chr1: 90948851-90948870 | UUUGAAAAACUUAAUUACUG | − |
| 2121 | 84146 | ZNF644 | intron_06 | chr1: 90941310-90972743 | chr1: 90948841-90948860 | UUAAUUACUGAGGUAUUAGA | − |
| 2122 | 84146 | ZNF644 | intron_06 | chr1: 90941310-90972743 | chr1: 90948791-90948810 | AGCAUGUCUAGCCUGAUGCU | + |
| 2123 | 84146 | ZNF644 | intron_06 | chr1: 90941310-90972743 | chr1: 90948786-90948805 | CAGGCUAGACAUGCUGGUAA | − |
| 2124 | 84146 | ZNF644 | intron_06 | chr1: 90941310-90972743 | chr1: 90948491-90948510 | GAUUGGUUCUAAAAACCUGG | + |
| 2125 | 84146 | ZNF644 | intron_06 | chr1: 90941310-90972743 | chr1: 90948488-90948507 | GCUGAUUGGUUCUAAAAACC | + |
| 2126 | 84146 | ZNF644 | intron_06 | chr1: 90941310-90972743 | chr1: 90948434-90948453 | GCCUUAACAGAUUGUUAAUG | + |
| 2127 | 84146 | ZNF644 | intron_06 | chr1: 90941310-90972743 | chr1: 90948370-90948389 | GACUGCAAAUGCAAACAUGG | + |
| 2128 | 84146 | ZNF644 | intron_06 | chr1: 90941310-90972743 | chr1: 90948367-90948386 | CAUGACUGCAAAUGCAAACA | + |
| 2129 | 84146 | ZNF644 | intron_06 | chr1: 90941310-90972743 | chr1: 90948344-90948363 | AGUAUGCACAACAAAGUUAG | + |
| 2130 | 84146 | ZNF644 | intron_06 | chr1: 90941310-90972743 | chr1: 90948313-90948332 | AUGUAUAUUCCACAGGAUCA | + |
| 2131 | 84146 | ZNF644 | intron_06 | chr1: 90941310-90972743 | chr1: 90948314-90948333 | UUGAUCCUGUGGAAUAUACA | − |
| 2132 | 84146 | ZNF644 | intron_06 | chr1: 90941310-90972743 | chr1: 90948203-90948222 | AAGCAAAUAGAUAUCUGACU | − |
| 2133 | 84146 | ZNF644 | intron_06 | chr1: 90941310-90972743 | chr1: 90948130-90948149 | AUAAUUGUUGUGAAAUUUAU | − |
| 2134 | 84146 | ZNF644 | intron_06 | chr1: 90941310-90972743 | chr1: 90947959-90947978 | AAUCAUUGUCAUUGUAAGUC | + |
| 2135 | 84146 | ZNF644 | intron_06 | chr1: 90941310-90972743 | chr1: 90947667-90947686 | GUGAGAGUGUUCAAAGUCCU | + |
| 2136 | 84146 | ZNF644 | intron_06 | chr1: 90941310-90972743 | chr1: 90947525-90947544 | UGGCAUAAUACUUUCUGUGG | − |
| 2137 | 84146 | ZNF644 | intron_06 | chr1: 90941310-90972743 | chr1: 90947481-90947500 | UAUGUCAAUCCCAUACUCCA | + |
| 2138 | 84146 | ZNF644 | intron_06 | chr1: 90941310-90972743 | chr1: 90947480-90947499 | GUAUGUCAAUCCCAUACUCC | + |
| 2139 | 84146 | ZNF644 | intron_06 | chr1: 90941310-90972743 | chr1: 90947386-90947405 | UUGACCACAUUUGUGUAACA | + |
| 2140 | 84146 | ZNF644 | intron_06 | chr1: 90941310-90972743 | chr1: 90947201-90947220 | UAUGACUUAGUACUCUCCUU | − |
| 2141 | 84146 | ZNF644 | intron_06 | chr1: 90941310-90972743 | chr1: 90947182-90947201 | UAAAUUACAGCUGCAACCAA | + |
| 2142 | 84146 | ZNF644 | intron_06 | chr1: 90941310-90972743 | chr1: 90947149-90947168 | CUAAUGAAGAAUUCUGCAAC | + |
| 2143 | 84146 | ZNF644 | intron_06 | chr1: 90941310-90972743 | chr1: 90947052-90947071 | UUUAAAGUUAUGUCUUUGUA | − |
| 2144 | 84146 | ZNF644 | intron_06 | chr1: 90941310-90972743 | chr1: 90947017-90947036 | CUGUGUGGAUGAAGGCAAGG | + |
| 2145 | 84146 | ZNF644 | intron_06 | chr1: 90941310-90972743 | chr1: 90947014-90947033 | UAACUGUGUGGAUGAAGGCA | + |
| 2146 | 84146 | ZNF644 | intron_06 | chr1: 90941310-90972743 | chr1: 90946911-90946930 | CUUGAGUUAUUAGGUGUUUA | − |
| 2147 | 84146 | ZNF644 | intron_06 | chr1: 90941310-90972743 | chr1: 90946846-90946865 | UGAGGAUGGUACAUGGCAUC | − |
| 2148 | 84146 | ZNF644 | intron_06 | chr1: 90941310-90972743 | chr1: 90946592-90946611 | GUUAACUAAAGGAUUAUUUC | − |
| 2149 | 84146 | ZNF644 | intron_06 | chr1: 90941310-90972743 | chr1: 90946407-90946426 | CAGACAGGAAUAUGGAGUUG | + |
| 2150 | 84146 | ZNF644 | intron_06 | chr1: 90941310-90972743 | chr1: 90946392-90946411 | UUGUCAAGAACAUUACAGAC | + |
| 2151 | 84146 | ZNF644 | intron_06 | chr1: 90941310-90972743 | chr1: 90946352-90946371 | AACCAUUUUAUUAUUUGGCU | − |
| 2152 | 84146 | ZNF644 | intron_06 | chr1: 90941310-90972743 | chr1: 90946219-90946238 | CUUCUCUUGAAGUGUGCACU | − |
| 2153 | 84146 | ZNF644 | intron_06 | chr1: 90941310-90972743 | chr1: 90945811-90945830 | CAAGUAGGUUAACAUUUUGU | + |
| 2154 | 84146 | ZNF644 | intron_06 | chr1: 90941310-90972743 | chr1: 90945810-90945829 | GCAAGUAGGUUAACAUUUUG | + |
| 2155 | 84146 | ZNF644 | intron_06 | chr1: 90941310-90972743 | chr1: 90945796-90945815 | UAAUUGUAUUUAUUGCAAGU | + |
| 2156 | 84146 | ZNF644 | intron_06 | chr1: 90941310-90972743 | chr1: 90945669-90945688 | UCUGAAUUACUGAGUGACCU | − |
| 2157 | 84146 | ZNF644 | intron_06 | chr1: 90941310-90972743 | chr1: 90945653-90945672 | ACCUAGGAAGCUUGCUCAGA | − |
| 2158 | 84146 | ZNF644 | intron_06 | chr1: 90941310-90972743 | chr1: 90945436-90945455 | GCACUAAAAAAAUUGUACAA | + |
| 2159 | 84146 | ZNF644 | intron_06 | chr1: 90941310-90972743 | chr1: 90945419-90945438 | UGCUCACAGUAUAUAACUAG | − |
| 2160 | 84146 | ZNF644 | intron_06 | chr1: 90941310-90972743 | chr1: 90945259-90945278 | UAUGGUUAUAUGAUUAUAUG | − |
| 2161 | 84146 | ZNF644 | intron_06 | chr1: 90941310-90972743 | chr1: 90945052-90945071 | AUAUACAUUUGACUAUACAA | − |
| 2162 | 84146 | ZNF644 | intron_06 | chr1: 90941310-90972743 | chr1: 90945028-90945047 | AGUUGAAAAACUAUUUGAGA | − |
| 2163 | 84146 | ZNF644 | intron_06 | chr1: 90941310-90972743 | chr1: 90944970-90944989 | UGUUGGGUUAUGUGGCAUCU | + |
| 2164 | 84146 | ZNF644 | intron_06 | chr1: 90941310-90972743 | chr1: 90944894-90944913 | CAACAGAUUUUGAUGAUCCA | − |
| 2165 | 84146 | ZNF644 | intron_06 | chr1: 90941310-90972743 | chr1: 90944745-90944764 | CAAGUAGAUUAACGUUUUGU | + |
| 2166 | 84146 | ZNF644 | intron_06 | chr1: 90941310-90972743 | chr1: 90944662-90944681 | AAUUACUCAUGAACAGAAAA | − |
| 2167 | 84146 | ZNF644 | intron_06 | chr1: 90941310-90972743 | chr1: 90944591-90944610 | AGGAAGCUUUCUAGGUCACU | + |
| 2168 | 84146 | ZNF644 | intron_06 | chr1: 90941310-90972743 | chr1: 90944583-90944602 | GUUGACUUAGGAAGCUUUCU | + |
| 2169 | 84146 | ZNF644 | intron_06 | chr1: 90941310-90972743 | chr1: 90944474-90944493 | AUUUUAUUAUGUGGAUGUGA | − |
| 2170 | 84146 | ZNF644 | intron_06 | chr1: 90941310-90972743 | chr1: 90944267-90944286 | GGAGACUGCAUCCUCAUUAC | + |
| 2171 | 84146 | ZNF644 | intron_06 | chr1: 90941310-90972743 | chr1: 90944246-90944265 | AUGAGAACAUCAUGUCAGCU | + |
| 2172 | 84146 | ZNF644 | intron_06 | chr1: 90941310-90972743 | chr1: 90944161-90944180 | UGGUGUUAGAGGUUUAGAGA | + |
| 2173 | 84146 | ZNF644 | intron_06 | chr1: 90941310-90972743 | chr1: 90944150-90944169 | CCCAUCUGUUCUGGUGUUAG | + |
| 2174 | 84146 | ZNF644 | intron_06 | chr1: 90941310-90972743 | chr1: 90944141-90944160 | UAUGUUCCACCCAUCUGUUC | + |
| 2175 | 84146 | ZNF644 | intron_06 | chr1: 90941310-90972743 | chr1: 90944153-90944172 | CCUCUAACACCAGAACAGAU | − |
| 2176 | 84146 | ZNF644 | intron_06 | chr1: 90941310-90972743 | chr1: 90944150-90944169 | CUAACACCAGAACAGAUGGG | − |
| 2177 | 84146 | ZNF644 | intron_06 | chr1: 90941310-90972743 | chr1: 90944136-90944155 | GAUGGGUGGAACAUAGAACA | − |
| 2178 | 84146 | ZNF644 | intron_06 | chr1: 90941310-90972743 | chr1: 90944115-90944134 | GGAAGGUUUUACCUCUGAGG | − |
| 2179 | 84146 | ZNF644 | intron_06 | chr1: 90941310-90972743 | chr1: 90944078-90944097 | GUAAAUUCAGUGUUAAUGAG | + |
| 2180 | 84146 | ZNF644 | intron_06 | chr1: 90941310-90972743 | chr1: 90944056-90944075 | AAGCAAUGUUGCUAACGAAG | + |
| 2181 | 84146 | ZNF644 | intron_06 | chr1: 90941310-90972743 | chr1: 90943981-90944000 | ACUUAUUAUAAUCACAGAGG | + |
| 2182 | 84146 | ZNF644 | intron_06 | chr1: 90941310-90972743 | chr1: 90943971-90943990 | UAUAAUAAGUGGGAACGGAA | − |
| 2183 | 84146 | ZNF644 | intron_06 | chr1: 90941310-90972743 | chr1: 90943799-90943818 | AAAGGGUGUGCAAAUGUCAA | + |
| 2184 | 84146 | ZNF644 | intron_06 | chr1: 90941310-90972743 | chr1: 90943782-90943801 | CAUAAACAUGUGUUAGGAAA | + |
| 2185 | 84146 | ZNF644 | intron_06 | chr1: 90941310-90972743 | chr1: 90943781-90943800 | ACAUAAACAUGUGUUAGGAA | + |
| 2186 | 84146 | ZNF644 | intron_06 | chr1: 90941310-90972743 | chr1: 90943713-90943732 | GUGAUGCAUUAGCACCAUUU | − |
| 2187 | 84146 | ZNF644 | intron_06 | chr1: 90941310-90972743 | chr1: 90943642-90943661 | UUGAGAUUGGCAAACUUCUG | + |
| 2188 | 84146 | ZNF644 | intron_06 | chr1: 90941310-90972743 | chr1: 90943629-90943648 | UUAGAAUUCUGUUUUGAGAU | + |
| 2189 | 84146 | ZNF644 | intron_06 | chr1: 90941310-90972743 | chr1: 90943619-90943638 | AGAAUUCUAAAACCUACGAG | − |
| 2190 | 84146 | ZNF644 | intron_06 | chr1: 90941310-90972743 | chr1: 90943093-90943112 | CAUGAAAUUGGUACCCUUAA | − |
| 2191 | 84146 | ZNF644 | intron_06 | chr1: 90941310-90972743 | chr1: 90943033-90943052 | UUUCUAAAUGUUAGAUUGUA | − |
| 2192 | 84146 | ZNF644 | intron_06 | chr1: 90941310-90972743 | chr1: 90943006-90943025 | UAAUACUAUUUUAGGGCAAC | + |
| 2193 | 84146 | ZNF644 | intron_06 | chr1: 90941310-90972743 | chr1: 90942895-90942914 | UUCCUGUAUUCCAGAUAUAA | + |
| 2194 | 84146 | ZNF644 | intron_06 | chr1: 90941310-90972743 | chr1: 90942790-90942809 | GUAUUAACUAAUUGAAGUAC | + |
| 2195 | 84146 | ZNF644 | intron_06 | chr1: 90941310-90972743 | chr1: 90942788-90942807 | ACUUCAAUUAGUUAAUACCU | − |
| 2196 | 84146 | ZNF644 | intron_06 | chr1: 90941310-90972743 | chr1: 90942772-90942791 | ACCUGGGGUUGCCAAAUAGC | − |
| 2197 | 84146 | ZNF644 | intron_06 | chr1: 90941310-90972743 | chr1: 90942673-90942692 | UGAUGGAACUUGUGUUUGAA | − |
| 2198 | 84146 | ZNF644 | intron_06 | chr1: 90941310-90972743 | chr1: 90942642-90942661 | AGUUUUGUUCCUAUGAAAUU | + |
| 2199 | 84146 | ZNF644 | intron_06 | chr1: 90941310-90972743 | chr1: 90942654-90942673 | AUGGGGUAUCCAAAUUUCAU | − |
| 2200 | 84146 | ZNF644 | intron_06 | chr1: 90941310-90972743 | chr1: 90942521-90942540 | AUCACUUGCCAUAGGUGCUC | + |
| 2201 | 84146 | ZNF644 | intron_06 | chr1: 90941310-90972743 | chr1: 90942513-90942532 | CCUAGUACAUCACUUGCCAU | + |
| 2202 | 84146 | ZNF644 | intron_06 | chr1: 90941310-90972743 | chr1: 90942413-90942432 | GCUCUUAGAAAUGGCCACAU | + |
| 2203 | 84146 | ZNF644 | intron_06 | chr1: 90941310-90972743 | chr1: 90942413-90942432 | AUGUGGCCAUUUCUAAGAGC | − |
| 2204 | 84146 | ZNF644 | intron_06 | chr1: 90941310-90972743 | chr1: 90942393-90942412 | AGGAAAAAAACAGGUUGCAA | − |
| 2205 | 84146 | ZNF644 | intron_06 | chr1: 90941310-90972743 | chr1: 90942376-90942395 | CAAGGGAACUUUUCAUAGUG | − |
| 2206 | 84146 | ZNF644 | intron_06 | chr1: 90941310-90972743 | chr1: 90942155-90942174 | CUAGACCACCAGAUCAUAAG | − |
| 2207 | 84146 | ZNF644 | intron_06 | chr1: 90941310-90972743 | chr1: 90942108-90942127 | UAUGUGGGGCCUCAAAUUCU | + |
| 2208 | 84146 | ZNF644 | intron_06 | chr1: 90941310-90972743 | chr1: 90942094-90942113 | AUGUCAAACUUUCAUAUGUG | + |
| 2209 | 84146 | ZNF644 | intron_06 | chr1: 90941310-90972743 | chr1: 90941944-90941963 | UUUUACAAUUGAUAGAAUGU | − |
| 2210 | 84146 | ZNF644 | intron_06 | chr1: 90941310-90972743 | chr1: 90941943-90941962 | UUUACAAUUGAUAGAAUGUU | − |
| 2211 | 84146 | ZNF644 | intron_06 | chr1: 90941310-90972743 | chr1: 90941830-90941849 | CAAUAAAGUUAUUUACUGAA | − |
| 2212 | 84146 | ZNF644 | intron_06 | chr1: 90941310-90972743 | chr1: 90941794-90941813 | ACUUAUAAGUUCAUUCCUGA | + |
| 2213 | 84146 | ZNF644 | intron_06 | chr1: 90941310-90972743 | chr1: 90941696-90941715 | GAAAAUUCUUUCACUUAAGU | + |
| 2214 | 84146 | ZNF644 | intron_06 | chr1: 90941310-90972743 | chr1: 90941564-90941583 | GCAACAUACACAAACACACU | + |
| 2215 | 84146 | ZNF644 | intron_06 | chr1: 90941310-90972743 | chr1: 90941493-90941512 | UUAAUAUUGUUCUUCAUGCU | + |
| 2216 | 84146 | ZNF644 | intron_06 | chr1: 90941310-90972743 | chr1: 90941350-90941369 | AAAAAUACUAUUAGAAUGUA | + |
| 2217 | 84146 | ZNF644 | exon_07_c.1/nc.1 | chr1: 90940949-90941309 | chr1: 90941278-90941297 | AAAUGGGCUUGCCAACAAUA | − |
| 2218 | 84146 | ZNF644 | exon_07_c.1/nc.1 | chr1: 90940949-90941309 | chr1: 90941193-90941212 | UUUAUCUCAGACAAAGAGAG | − |
| 2219 | 84146 | ZNF644 | exon_07_c.1/nc.1 | chr1: 90940949-90941309 | chr1: 90941157-90941176 | AAUGAUGUUUGACAAUCUUU | + |
| 2220 | 84146 | ZNF644 | exon_07_c.1/nc.1 | chr1: 90940949-90941309 | chr1: 90941116-90941135 | UCUGCCUGAAGAACUGUCAA | − |
| 2221 | 84146 | ZNF644 | exon_07_c.1/nc.1 | chr1: 90940949-90941309 | chr1: 90941075-90941094 | ACUAGACUGGCCUCCACUUA | + |
| 2222 | 84146 | ZNF644 | exon_07_c.1/nc.1 | chr1: 90940949-90941309 | chr1: 90941062-90941081 | CAUGUAUAAAUAGACUAGAC | + |
| 2223 | 84146 | ZNF644 | exon_07_c.1/nc.1 | chr1: 90940949-90941309 | chr1: 90940977-90940996 | GUUAAGGAGGAGUGUGAAAC | + |
| 2224 | 84146 | ZNF644 | exon_07_c.1/nc.1 | chr1: 90940949-90941309 | chr1: 90940961-90940980 | CAUAUUGGAAGUCUUAGUUA | + |
| 2225 | 84146 | ZNF644 | exon_07_c.1/ | chr1: 90940121-90940948 | chr1: 90940888-90940907 | AGAAUCUUGUUCAACUUUGA | − |
| 2226 | 84146 | ZNF644 | exon_07_c.1/ | chr1: 90940121-90940948 | chr1: 90940836-90940855 | UGGUGUUGACUUGCUUUCUG | + |
| 2227 | 84146 | ZNF644 | exon_07_c.1/ | chr1: 90940121-90940948 | chr1: 90940768-90940787 | UAGGUAGUUUUUUAUUGGAA | + |
| 2228 | 84146 | ZNF644 | exon_07_c.1/ | chr1: 90940121-90940948 | chr1: 90940749-90940768 | CAACCAACUGAAGCAGAGGU | + |
| 2229 | 84146 | ZNF644 | exon_07_c.1/ | chr1: 90940121-90940948 | chr1: 90940755-90940774 | CUACCUACCUCUGCUUCAGU | − |
| 2230 | 84146 | ZNF644 | exon_07_c.1/ | chr1: 90940121-90940948 | chr1: 90940730-90940749 | GUGACAUUCAGAAUUCAGUA | − |
| 2231 | 84146 | ZNF644 | exon_07_c.1/ | chr1: 90940121-90940948 | chr1: 90940710-90940729 | GGGAGUAAUAUAAAGUCAGA | − |
| 2232 | 84146 | ZNF644 | exon_07_c.1/ | chr1: 90940121-90940948 | chr1: 90940687-90940706 | CACUUUAAUAAAUCAAGUAG | − |
| 2233 | 84146 | ZNF644 | exon_07_c.1/ | chr1: 90940121-90940948 | chr1: 90940630-90940649 | UGAUUGUGUCAAUACAGUAA | − |
| 2234 | 84146 | ZNF644 | exon_07_c.1/ | chr1: 90940121-90940948 | chr1: 90940617-90940636 | ACAGUAACGGGAAUUUCCUC | − |
| 2235 | 84146 | ZNF644 | exon_07_c.1/ | chr1: 90940121-90940948 | chr1: 90940601-90940620 | CCUCAGGUACAGAUGGAUUU | − |
| 2236 | 84146 | ZNF644 | exon_07_c.1/ | chr1: 90940121-90940948 | chr1: 90940285-90940304 | UGAUGAAGACUUAGAAUCUG | − |
| 2237 | 84146 | ZNF644 | exon_07_c.1/ | chr1: 90940121-90940948 | chr1: 90940245-90940264 | AUUUAUAACCCAGAUAAGUG | − |
| 2238 | 84146 | ZNF644 | exon_07_c.1/nc.2 | chr1: 90940070-90940120 | chr1: 90940102-90940121 | UCACAUUGCACUUUGUACAG | + |
| 2239 | 84146 | ZNF644 | exon_07_c.1/nc.2 | chr1: 90940070-90940120 | chr1: 90940101-90940120 | UUCACAUUGCACUUUGUACA | + |
| 2240 | 84146 | ZNF644 | exon_07_c.1/nc.2 | chr1: 90940070-90940120 | chr1: 90940060-90940079 | GAUACAUCAUAUGCCUGUGG | + |
| 2241 | 84146 | ZNF644 | exon_07_c.2/ | chr1: 90938272-90940069 | chr1: 90940052-90940071 | AUAUGAUGUAUCAUUUAGAU | − |
| 2242 | 84146 | ZNF644 | exon_07_c.2/ | chr1: 90938272-90940069 | chr1: 90940000-90940019 | CUCUACAAGCAUAUGGCCUU | + |
| 2243 | 84146 | ZNF644 | exon_07_c.2/ | chr1: 90938272-90940069 | chr1: 90939992-90940011 | AUGCUUGUAGAGAAUGUGGA | − |
| 2244 | 84146 | ZNF644 | exon_07_c.2/ | chr1: 90938272-90940069 | chr1: 90939811-90939830 | CAUGUUGCACAAAUGUUUUA | + |
| 2245 | 84146 | ZNF644 | exon_07_c.2/ | chr1: 90938272-90940069 | chr1: 90939810-90939829 | GCAUGUUGCACAAAUGUUUU | + |
| 2246 | 84146 | ZNF644 | exon_07_c.2/ | chr1: 90938272-90940069 | chr1: 90939782-90939801 | GUACCUUUUAUCUUUUUCAU | + |
| 2247 | 84146 | ZNF644 | exon_07_c.2/ | chr1: 90938272-90940069 | chr1: 90939711-90939730 | UGCCAUCGAGGCAUUGCACA | − |
| 2248 | 84146 | ZNF644 | exon_07_c.2/ | chr1: 90938272-90940069 | chr1: 90939670-90939689 | CAAUAUCAGAAGUGACCAUA | + |
| 2249 | 84146 | ZNF644 | exon_07_c.2/ | chr1: 90938272-90940069 | chr1: 90939624-90939643 | UUCAUGAAAGACUCUGUAGU | − |
| 2250 | 84146 | ZNF644 | exon_07_c.2/ | chr1: 90938272-90940069 | chr1: 90939578-90939597 | AGGACACAUCUUACAUAUGU | + |
| 2251 | 84146 | ZNF644 | exon_07_c.2/ | chr1: 90938272-90940069 | chr1: 90939504-90939523 | UCAUCAUGUGUUGAUUCAUU | − |
| 2252 | 84146 | ZNF644 | exon_07_c.2/ | chr1: 90938272-90940069 | chr1: 90939474-90939493 | UUUCUUUUAUCAAGUCCAAG | + |
| 2253 | 84146 | ZNF644 | exon_07_c.2/ | chr1: 90938272-90940069 | chr1: 90939329-90939348 | UGAAAAACUACUUGAUUGUG | + |
| 2254 | 84146 | ZNF644 | exon_07_c.2/ | chr1: 90938272-90940069 | chr1: 90939177-90939196 | GCUGCUUGAUGGAAAUACUU | + |
| 2255 | 84146 | ZNF644 | exon_07_c.2/ | chr1: 90938272-90940069 | chr1: 90939137-90939156 | CAAAUAGUGGCUAUUUGCCU | + |
| 2256 | 84146 | ZNF644 | exon_07_c.2/ | chr1: 90938272-90940069 | chr1: 90939113-90939132 | GACACAAAUAUGAAAACUAU | − |
| 2257 | 84146 | ZNF644 | exon_07_c.2/ | chr1: 90938272-90940069 | chr1: 90938951-90938970 | UUUGAAGCUUUCAGGCCUUU | + |
| 2258 | 84146 | ZNF644 | exon_07_c.2/ | chr1: 90938272-90940069 | chr1: 90938917-90938936 | AGCUGUAAAGAGAGUAAUUA | − |
| 2259 | 84146 | ZNF644 | exon_07_c.2/ | chr1: 90938272-90940069 | chr1: 90938774-90938793 | AAACAGAAGAUGAAAGUUCC | − |
| 2260 | 84146 | ZNF644 | exon_07_c.2/ | chr1: 90938272-90940069 | chr1: 90938753-90938772 | UCCUAACUCAACAUUAUCCC | + |
| 2261 | 84146 | ZNF644 | exon_07_c.2/ | chr1: 90938272-90940069 | chr1: 90938714-90938733 | ACUAUAGGUUUCAUCUUCUA | + |
| 2262 | 84146 | ZNF644 | exon_07_c.2/ | chr1: 90938272-90940069 | chr1: 90938699-90938718 | CUCUUGAUUAAUAUCACUAU | + |
| 2263 | 84146 | ZNF644 | exon_07_c.2/ | chr1: 90938272-90940069 | chr1: 90938649-90938668 | AAAGUGGAAGGUCAGGAGCC | − |
| 2264 | 84146 | ZNF644 | exon_07_c.2/ | chr1: 90938272-90940069 | chr1: 90938628-90938647 | CUAAGAGUAGCAUUUUCUCC | + |
| 2265 | 84146 | ZNF644 | exon_07_c.2/ | chr1: 90938272-90940069 | chr1: 90938436-90938455 | UCAAAUGUUGCUGGGCAGUA | + |
| 2266 | 84146 | ZNF644 | exon_07_c.2/ | chr1: 90938272-90940069 | chr1: 90938427-90938446 | ACACCUGUUUCAAAUGUUGC | + |
| 2267 | 84146 | ZNF644 | exon_07_c.2/ | chr1: 90938272-90940069 | chr1: 90938347-90938366 | GUUCUGGUGAUACAACAUGA | + |
| 2268 | 84146 | ZNF644 | exon_07_c.2/ | chr1: 90938272-90940069 | chr1: 90938307-90938326 | AUGCAGCAUUUCAAAAGAAC | − |
| 2269 | 84146 | ZNF644 | exon_07_c.2/ | chr1: 90938272-90940069 | chr1: 90938301-90938320 | CAUUUCAAAAGAACUGGCAC | − |
| 2270 | 84146 | ZNF644 | intron_07 | chr1: 90938091-90938271 | chr1: 90938248-90938267 | GUUCUCCAUGGGGAUGAUUU | |
| 2271 | 84146 | ZNF644 | intron_07 | chr1: 90938091-90938271 | chr1: 90938143-90938162 | AGAAUUAACUCAUUUUAGGG | − |
| 2272 | 84146 | ZNF644 | exon_08_c | chr1: 90937939-90938090 | chr1: 90938042-90938061 | CACACUUGUCAGCUCUGUGG | − |
| 2273 | 84146 | ZNF644 | exon_08_c | chr1: 90937939-90938090 | chr1: 90938000-90938019 | GGAUUAUCAAAUCAUGUUAG | − |
| 2274 | 84146 | ZNF644 | exon_08_c | chr1: 90937485-90937882 | chr1: 90937844-90937863 | UUUUGAGCUACAAAUGGUCU | + |
| 2275 | 84146 | ZNF644 | exon_08_c | chr1: 90937485-90937882 | chr1: 90937758-90937777 | CUGACAGAGCUUCAGUCUUU | + |
| 2276 | 84146 | ZNF644 | exon_08_c | chr1: 90937485-90937882 | chr1: 90937679-90937698 | UUUUUCCCACUGGGCAGUUC | + |
| 2277 | 84146 | ZNF644 | exon_08_c | chr1: 90937485-90937882 | chr1: 90937539-90937558 | AUGCGUUCUUCCAUUAAAUG | − |
| 2278 | 84146 | ZNF644 | exon_08_c | chr1: 90937485-90937882 | chr1: 90937506-90937525 | GAUGUAUCAGCCACAAAAAA | − |
| 2279 | 84146 | ZNF644 | exon_08_c | chr1: 90937485-90937882 | chr1: 90937487-90937506 | AUGGACUUGACUAUGCACUC | − |
| 2280 | 84146 | ZNF644 | intron_08 | chr1: 90935529-90937484 | chr1: 90937480-90937499 | UGACUAUGCACUCAGGUAAG | − |
| 2281 | 84146 | ZNF644 | intron_08 | chr1: 90935529-90937484 | chr1: 90937408-90937427 | CACAUAGAUUCCAUUAAAGA | + |
| 2282 | 84146 | ZNF644 | intron_08 | chr1: 90935529-90937484 | chr1: 90937165-90937184 | AUAAAACUUGCUCUGGCUGG | − |
| 2283 | 84146 | ZNF644 | intron_08 | chr1: 90935529-90937484 | chr1: 90937155-90937174 | CUCUGGCUGGAGGAUGGUUG | − |
| 2284 | 84146 | ZNF644 | intron_08 | chr1: 90935529-90937484 | chr1: 90937150-90937169 | GCUGGAGGAUGGUUGUGGAU | − |
| 2285 | 84146 | ZNF644 | intron_08 | chr1: 90935529-90937484 | chr1: 90937059-90937078 | UCUUGAAAACAUGAUCACCU | + |
| 2286 | 84146 | ZNF644 | intron_08 | chr1: 90935529-90937484 | chr1: 90937033-90937052 | UGUUGGUUUUUCCACUGCUU | − |
| 2287 | 84146 | ZNF644 | intron_08 | chr1: 90935529-90937484 | chr1: 90936940-90936959 | AUACAAUGAGGAAUUGGAGA | + |
| 2288 | 84146 | ZNF644 | intron_08 | chr1: 90935529-90937484 | chr1: 90936888-90936907 | GAACAUAAAACAUAUUUGUU | − |
| 2289 | 84146 | ZNF644 | intron_08 | chr1: 90935529-90937484 | chr1: 90936851-90936870 | AGAUAGUGCUCUAAUGGAAC | − |
| 2290 | 84146 | ZNF644 | intron_08 | chr1: 90935529-90937484 | chr1: 90936784-90936803 | UACAAAAUAUUCCUUUCAAA | + |
| 2291 | 84146 | ZNF644 | intron_08 | chr1: 90935529-90937484 | chr1: 90936592-90936611 | GUGUCAGAGGUAAUAGUUAA | − |
| 2292 | 84146 | ZNF644 | intron_08 | chr1: 90935529-90937484 | chr1: 90936542-90936561 | GUAAUGUUGUUUAUUUGCUU | − |
| 2293 | 84146 | ZNF644 | intron_08 | chr1: 90935529-90937484 | chr1: 90936540-90936559 | AAUGUUGUUUAUUUGCUUUG | − |
| 2294 | 84146 | ZNF644 | intron_08 | chr1: 90935529-90937484 | chr1: 90936467-90936486 | AGAUAACUUUGUAUUGUAAG | − |
| 2295 | 84146 | ZNF644 | intron_08 | chr1: 90935529-90937484 | chr1: 90936462-90936481 | ACUUUGUAUUGUAAGUGGUC | − |
| 2296 | 84146 | ZNF644 | intron_08 | chr1: 90935529-90937484 | chr1: 90936352-90936371 | UUUUCAGAAGGGUAAAACGC | − |
| 2297 | 84146 | ZNF644 | intron_08 | chr1: 90935529-90937484 | chr1: 90936351-90936370 | UUUCAGAAGGGUAAAACGCA | − |
| 2298 | 84146 | ZNF644 | intron_08 | chr1: 90935529-90937484 | chr1: 90936322-90936341 | UGUUAGCUGUGUUGACCAAG | − |
| 2299 | 84146 | ZNF644 | intron_08 | chr1: 90935529-90937484 | chr1: 90936303-90936322 | GGGGUAGUAUACUUCAGAGA | − |
| 2300 | 84146 | ZNF644 | intron_08 | chr1: 90935529-90937484 | chr1: 90936247-90936266 | AGAAACCAGUUGAAAUGUGU | − |
| 2301 | 84146 | ZNF644 | intron_08 | chr1: 90935529-90937484 | chr1: 90936246-90936265 | GAAACCAGUUGAAAUGUGUU | − |
| 2302 | 84146 | ZNF644 | intron_08 | chr1: 90935529-90937484 | chr1: 90936245-90936264 | AAACCAGUUGAAAUGUGUUG | − |
| 2303 | 84146 | ZNF644 | intron_08 | chr1: 90935529-90937484 | chr1: 90936244-90936263 | AACCAGUUGAAAUGUGUUGG | − |
| 2304 | 84146 | ZNF644 | intron_08 | chr1: 90935529-90937484 | chr1: 90936034-90936053 | UGUGUCUAACAGCUGUUCAG | − |
| 2305 | 84146 | ZNF644 | intron_08 | chr1: 90935529-90937484 | chr1: 90935983-90936002 | UAAAUUAGGCUUUCUGAUGA | + |
| 2306 | 84146 | ZNF644 | intron_08 | chr1: 90935529-90937484 | chr1: 90935969-90935988 | AAAAGUCUCAAUACUAAAUU | + |
| 2307 | 84146 | ZNF644 | intron_08 | chr1: 90935529-90937484 | chr1: 90935784-90935803 | AUCUGCAAGAAAGUAAUAAU | − |
| 2308 | 84146 | ZNF644 | intron_08 | chr1: 90935529-90937484 | chr1: 90935709-90935728 | UAGAGUCAACUCAUGCUCUU | + |
| 2309 | 84146 | ZNF644 | intron_08 | chr1: 90935529-90937484 | chr1: 90935648-90935667 | AGGUUAACUUAAAAUAAGGA | + |
| 2310 | 84146 | ZNF644 | intron_08 | chr1: 90935529-90937484 | chr1: 90935647-90935666 | UAGGUUAACUUAAAAUAAGG | + |
| 2311 | 84146 | ZNF644 | intron_08 | chr1: 90935529-90937484 | chr1: 90935559-90935578 | UCACUUUUUGAAGUGAGAAC | − |
| 2312 | 84146 | ZNF644 | exon_09_nc | chr1: 90935408-90935528 | chr1: 90935416-90935435 | AAGAGUGCUGGACUUUUGAC | − |
| 2313 | 84146 | ZNF644 | intron_09 | chr1: 90918392-90935407 | chr1: 90935195-90935214 | GCUCUUAUUGACUUAAUUUG | − |
| 2314 | 84146 | ZNF644 | intron_09 | chr1: 90918392-90935407 | chr1: 90935156-90935175 | CUCAAAGUUCCACACCUCUU | + |
| 2315 | 84146 | ZNF644 | intron_09 | chr1: 90918392-90935407 | chr1: 90935071-90935090 | UAUAAAGAGAGGUGUUUUAC | + |
| 2316 | 84146 | ZNF644 | intron_09 | chr1: 90918392-90935407 | chr1: 90934898-90934917 | AAUAUUGUAGUUCUAGCUUG | − |
| 2317 | 84146 | ZNF644 | intron_09 | chr1: 90918392-90935407 | chr1: 90934840-90934859 | UUCAAAAUGUAGACUUGAUU | − |
| 2318 | 84146 | ZNF644 | intron_09 | chr1: 90918392-90935407 | chr1: 90934787-90934806 | UCUAUAGAUUAGAUCUUUGA | − |
| 2319 | 84146 | ZNF644 | intron_09 | chr1: 90918392-90935407 | chr1: 90934786-90934805 | CUAUAGAUUAGAUCUUUGAA | − |
| 2320 | 84146 | ZNF644 | intron_09 | chr1: 90918392-90935407 | chr1: 90934785-90934804 | UAUAGAUUAGAUCUUUGAAG | − |
| 2321 | 84146 | ZNF644 | intron_09 | chr1: 90918392-90935407 | chr1: 90934755-90934774 | GUCAACACAAGCCAUUAUUA | + |
| 2322 | 84146 | ZNF644 | intron_09 | chr1: 90918392-90935407 | chr1: 90934605-90934624 | CACAGAUGAGCAGUAUUAAG | + |
| 2323 | 84146 | ZNF644 | intron_09 | chr1: 90918392-90935407 | chr1: 90934497-90934516 | AAAUGAGAUUUGCUGAAGCA | + |
| 2324 | 84146 | ZNF644 | intron_09 | chr1: 90918392-90935407 | chr1: 90934474-90934493 | GGGUAUAUUUUAAGAUGUGA | + |
| 2325 | 84146 | ZNF644 | intron_09 | chr1: 90918392-90935407 | chr1: 90934454-90934473 | GUAGAUCUAUGUCAAAAAGA | + |
| 2326 | 84146 | ZNF644 | intron_09 | chr1: 90918392-90935407 | chr1: 90934453-90934472 | UGUAGAUCUAUGUCAAAAAG | + |
| 2327 | 84146 | ZNF644 | intron_09 | chr1: 90918392-90935407 | chr1: 90934301-90934320 | UUUUGAAAGCAAGAACAUAU | + |
| 2328 | 84146 | ZNF644 | intron_09 | chr1: 90918392-90935407 | chr1: 90934187-90934206 | AUAUUAAAAAGAGAGGAGUG | − |
| 2329 | 84146 | ZNF644 | intron_09 | chr1: 90918392-90935407 | chr1: 90934137-90934156 | AAUUAUAAUCUCAGAGUAGG | + |
| 2330 | 84146 | ZNF644 | intron_09 | chr1: 90918392-90935407 | chr1: 90934106-90934125 | GCCAAGCCUGAUAAAGGUGA | + |
| 2331 | 84146 | ZNF644 | intron_09 | chr1: 90918392-90935407 | chr1: 90934105-90934124 | UGCCAAGCCUGAUAAAGGUG | + |
| 2332 | 84146 | ZNF644 | intron_09 | chr1: 90918392-90935407 | chr1: 90934100-90934119 | UCACUUGCCAAGCCUGAUAA | + |
| 2333 | 84146 | ZNF644 | intron_09 | chr1: 90918392-90935407 | chr1: 90934087-90934106 | CAAGUGAUUGCAGACAUUAG | − |
| 2334 | 84146 | ZNF644 | intron_09 | chr1: 90918392-90935407 | chr1: 90934084-90934103 | GUGAUUGCAGACAUUAGAGG | − |
| 2335 | 84146 | ZNF644 | intron_09 | chr1: 90918392-90935407 | chr1: 90934051-90934070 | AAAUAAGAGACUAUACAAGU | − |
| 2336 | 84146 | ZNF644 | intron_09 | chr1: 90918392-90935407 | chr1: 90933699-90933718 | AAUGGAAAAUUCUAAAAUGA | − |
| 2337 | 84146 | ZNF644 | intron_09 | chr1: 90918392-90935407 | chr1: 90933364-90933383 | UUUAAACCCACCUUCAGGCU | + |
| 2338 | 84146 | ZNF644 | intron_09 | chr1: 90918392-90935407 | chr1: 90933292-90933311 | CAGAGAUCCAAGAAGUGCUU | − |
| 2339 | 84146 | ZNF644 | intron_09 | chr1: 90918392-90935407 | chr1: 90933219-90933238 | GAUUAUGCAAAUAUCCAAUA | − |
| 2340 | 84146 | ZNF644 | intron_09 | chr1: 90918392-90935407 | chr1: 90933074-90933093 | AAUCUUCAUAAGUGCAUUCU | + |
| 2341 | 84146 | ZNF644 | intron_09 | chr1: 90918392-90935407 | chr1: 90933036-90933055 | AUCAGAGAGAAAAGUAAUGU | − |
| 2342 | 84146 | ZNF644 | intron_09 | chr1: 90918392-90935407 | chr1: 90933028-90933047 | GAAAAGUAAUGUAGGAUGAC | − |
| 2343 | 84146 | ZNF644 | intron_09 | chr1: 90918392-90935407 | chr1: 90933015-90933034 | GGAUGACUGGGAAUAUGUUU | − |
| 2344 | 84146 | ZNF644 | intron_09 | chr1: 90918392-90935407 | chr1: 90932996-90933015 | UAGGUCCUGAAGAAUAAAAG | − |
| 2345 | 84146 | ZNF644 | intron_09 | chr1: 90918392-90935407 | chr1: 90932995-90933014 | AGGUCCUGAAGAAUAAAAGA | − |
| 2346 | 84146 | ZNF644 | intron_09 | chr1: 90918392-90935407 | chr1: 90932940-90932959 | UCCUAGUACUUCUAAUAUUU | + |
| 2347 | 84146 | ZNF644 | intron_09 | chr1: 90918392-90935407 | chr1: 90932923-90932942 | GGAAAUAGAAAGCGUGUGUU | − |
| 2348 | 84146 | ZNF644 | intron_09 | chr1: 90918392-90935407 | chr1: 90932902-90932921 | GGCAGUCCUAGGCAAAGAAA | − |
| 2349 | 84146 | ZNF644 | intron_09 | chr1: 90918392-90935407 | chr1: 90932809-90932828 | AAACUAAUGCUUCUUUUUCU | − |
| 2350 | 84146 | ZNF644 | intron_09 | chr1: 90918392-90935407 | chr1: 90932655-90932674 | ACAAUACAGAAUUCUCUAUC | + |
| 2351 | 84146 | ZNF644 | intron_09 | chr1: 90918392-90935407 | chr1: 90932605-90932624 | AUAACAGUGAUAUUGAUAUG | + |
| 2352 | 84146 | ZNF644 | intron_09 | chr1: 90918392-90935407 | chr1: 90932582-90932601 | GCAGUGUUCCUAAAAACCUA | − |
| 2353 | 84146 | ZNF644 | intron_09 | chr1: 90918392-90935407 | chr1: 90932572-90932591 | UAAAAACCUAUGGCCCUAGA | − |
| 2354 | 84146 | ZNF644 | intron_09 | chr1: 90918392-90935407 | chr1: 90932556-90932575 | UAACCAAGUGGAACCUUCUA | + |
| 2355 | 84146 | ZNF644 | intron_09 | chr1: 90918392-90935407 | chr1: 90932555-90932574 | AUAACCAAGUGGAACCUUCU | + |
| 2356 | 84146 | ZNF644 | intron_09 | chr1: 90918392-90935407 | chr1: 90932422-90932441 | CAAAAUUGGAACAAUGUAAA | − |
| 2357 | 84146 | ZNF644 | intron_09 | chr1: 90918392-90935407 | chr1: 90932373-90932392 | UACACAUACUGGACAUGGUU | + |
| 2358 | 84146 | ZNF644 | intron_09 | chr1: 90918392-90935407 | chr1: 90932368-90932387 | AGAAAUACACAUACUGGACA | + |
| 2359 | 84146 | ZNF644 | intron_09 | chr1: 90918392-90935407 | chr1: 90932254-90932273 | UAUCACAGGUAACCAAAAGC | + |
| 2360 | 84146 | ZNF644 | intron_09 | chr1: 90918392-90935407 | chr1: 90932216-90932235 | AGGAGCUGUGGCUUCUAAGA | + |
| 2361 | 84146 | ZNF644 | intron_09 | chr1: 90918392-90935407 | chr1: 90932217-90932236 | UUCUUAGAAGCCACAGCUCC | − |
| 2362 | 84146 | ZNF644 | intron_09 | chr1: 90918392-90935407 | chr1: 90932118-90932137 | AUAUCCUUUUCAGUGUAUUC | + |
| 2363 | 84146 | ZNF644 | intron_09 | chr1: 90918392-90935407 | chr1: 90932125-90932144 | GUAUCCUGAAUACACUGAAA | − |
| 2364 | 84146 | ZNF644 | intron_09 | chr1: 90918392-90935407 | chr1: 90932085-90932104 | UACCAGUAAACAGGUAUUUU | + |
| 2365 | 84146 | ZNF644 | intron_09 | chr1: 90918392-90935407 | chr1: 90932064-90932083 | CUUAAAUACUUCUAAUGUGA | − |
| 2366 | 84146 | ZNF644 | intron_09 | chr1: 90918392-90935407 | chr1: 90931976-90931995 | ACAAAUAAGUGCAUGUUUCU | + |
| 2367 | 84146 | ZNF644 | intron_09 | chr1: 90918392-90935407 | chr1: 90931854-90931873 | AGGAAAGUAGAAACAGAACU | − |
| 2368 | 84146 | ZNF644 | intron_09 | chr1: 90918392-90935407 | chr1: 90931767-90931786 | CAUAAUAGCAAAACUAAUUG | − |
| 2369 | 84146 | ZNF644 | intron_09 | chr1: 90918392-90935407 | chr1: 90931766-90931785 | AUAAUAGCAAAACUAAUUGU | − |
| 2370 | 84146 | ZNF644 | intron_09 | chr1: 90918392-90935407 | chr1: 90931729-90931748 | GGUUCCUUUUACAAAUAUUA | + |
| 2371 | 84146 | ZNF644 | intron_09 | chr1: 90918392-90935407 | chr1: 90931725-90931744 | AUUUGUAAAAGGAACCGAUG | − |
| 2372 | 84146 | ZNF644 | intron_09 | chr1: 90918392-90935407 | chr1: 90931684-90931703 | AAUUGAAGAUUUGGAAGAGG | − |
| 2373 | 84146 | ZNF644 | intron_09 | chr1: 90918392-90935407 | chr1: 90931673-90931692 | UGGAAGAGGUGGGCAGACUU | − |
| 2374 | 84146 | ZNF644 | intron_09 | chr1: 90918392-90935407 | chr1: 90931600-90931619 | AAGAUAAACUGGGACAGUUC | + |
| 2375 | 84146 | ZNF644 | intron_09 | chr1: 90918392-90935407 | chr1: 90931589-90931608 | CUACCCAACAGAAGAUAAAC | + |
| 2376 | 84146 | ZNF644 | intron_09 | chr1: 90918392-90935407 | chr1: 90931440-90931459 | CUGCCUUAAAUUUACAAUAU | + |
| 2377 | 84146 | ZNF644 | intron_09 | chr1: 90918392-90935407 | chr1: 90931446-90931465 | UAUCCUAUAUUGUAAAUUUA | − |
| 2378 | 84146 | ZNF644 | intron_09 | chr1: 90918392-90935407 | chr1: 90931394-90931413 | UUAUUUAUGGAAUGCAGUAA | − |
| 2379 | 84146 | ZNF644 | intron_09 | chr1: 90918392-90935407 | chr1: 90931390-90931409 | UUAUGGAAUGCAGUAAUGGU | − |
| 2380 | 84146 | ZNF644 | intron_09 | chr1: 90918392-90935407 | chr1: 90931323-90931342 | UGCUCAUACAGAUUUUUUUC | − |
| 2381 | 84146 | ZNF644 | intron_09 | chr1: 90918392-90935407 | chr1: 90931234-90931253 | UAGCUUAUAUUAAUUACUUC | − |
| 2382 | 84146 | ZNF644 | intron_09 | chr1: 90918392-90935407 | chr1: 90931139-90931158 | AUAGAACUAUGUUCUUAAUA | + |
| 2383 | 84146 | ZNF644 | intron_09 | chr1: 90918392-90935407 | chr1: 90931128-90931147 | UAGUUCUAUUAAGUUAUUAA | − |
| 2384 | 84146 | ZNF644 | intron_09 | chr1: 90918392-90935407 | chr1: 90931067-90931086 | UAAAAGAGGCACUAGUACUU | + |
| 2385 | 84146 | ZNF644 | intron_09 | chr1: 90918392-90935407 | chr1: 90931031-90931050 | AUUAAUUUAUCAUUCAAUCC | + |
| 2386 | 84146 | ZNF644 | intron_09 | chr1: 90918392-90935407 | chr1: 90930577-90930596 | UAUGAUAGUGACUUCUUAAG | + |
| 2387 | 84146 | ZNF644 | intron_09 | chr1: 90918392-90935407 | chr1: 90930539-90930558 | CCUAAGAGAAAGAGGCAGUU | + |
| 2388 | 84146 | ZNF644 | intron_09 | chr1: 90918392-90935407 | chr1: 90930542-90930561 | CCUAACUGCCUCUUUCUCUU | − |
| 2389 | 84146 | ZNF644 | intron_09 | chr1: 90918392-90935407 | chr1: 90930482-90930501 | CAUAACUCUUCUGUGGCAGC | − |
| 2390 | 84146 | ZNF644 | intron_09 | chr1: 90918392-90935407 | chr1: 90930408-90930427 | UAAAUCAAAUGCUAACCUCU | − |
| 2391 | 84146 | ZNF644 | intron_09 | chr1: 90918392-90935407 | chr1: 90929984-90930003 | ACGUAUCAAGAAAGUGUUCU | + |
| 2392 | 84146 | ZNF644 | intron_09 | chr1: 90918392-90935407 | chr1: 90929777-90929796 | UUCAGCUUUAAUGAUAUAAU | − |
| 2393 | 84146 | ZNF644 | intron_09 | chr1: 90918392-90935407 | chr1: 90929751-90929770 | GUACUUGUUACAGUCCUGUG | + |
| 2394 | 84146 | ZNF644 | intron_09 | chr1: 90918392-90935407 | chr1: 90929717-90929736 | CACAGUAUCAAGUGCUGAAU | − |
| 2395 | 84146 | ZNF644 | intron_09 | chr1: 90918392-90935407 | chr1: 90929680-90929699 | GAAAAGUCAUUCUUAUGUUG | − |
| 2396 | 84146 | ZNF644 | intron_09 | chr1: 90918392-90935407 | chr1: 90929597-90929616 | ACAAAUAAUUUAAUGCACAU | + |
| 2397 | 84146 | ZNF644 | intron_09 | chr1: 90918392-90935407 | chr1: 90929435-90929454 | CAGAAGCAAGUUUGCUCAUU | + |
| 2398 | 84146 | ZNF644 | intron_09 | chr1: 90918392-90935407 | chr1: 90929385-90929404 | AUACCCUCCUCAGCCCAGUC | + |
| 2399 | 84146 | ZNF644 | intron_09 | chr1: 90918392-90935407 | chr1: 90929274-90929293 | CAAGAUAGUAUACAACUAAA | − |
| 2400 | 84146 | ZNF644 | intron_09 | chr1: 90918392-90935407 | chr1: 90929250-90929269 | AUAUUGGCUUUAAGUGUUGU | − |
| 2401 | 84146 | ZNF644 | intron_09 | chr1: 90918392-90935407 | chr1: 90929242-90929261 | UUUAAGUGUUGUAGGAGUUC | − |
| 2402 | 84146 | ZNF644 | intron_09 | chr1: 90918392-90935407 | chr1: 90929194-90929213 | AAUUCCCAGCUGCCCUCAAA | + |
| 2403 | 84146 | ZNF644 | intron_09 | chr1: 90918392-90935407 | chr1: 90929201-90929220 | GCCUCCUUUUGAGGGCAGCU | − |
| 2404 | 84146 | ZNF644 | intron_09 | chr1: 90918392-90935407 | chr1: 90929149-90929168 | UUCAAUGAGACAAACAGUAA | + |
| 2405 | 84146 | ZNF644 | intron_09 | chr1: 90918392-90935407 | chr1: 90929032-90929051 | AUAAAAUUUUGUAUGGCUGC | + |
| 2406 | 84146 | ZNF644 | intron_09 | chr1: 90918392-90935407 | chr1: 90928941-90928960 | UUAUAUUAUGUUUAUGCAGC | + |
| 2407 | 84146 | ZNF644 | intron_09 | chr1: 90918392-90935407 | chr1: 90928936-90928955 | AUAAACAUAAUAUAACCCAG | − |
| 2408 | 84146 | ZNF644 | intron_09 | chr1: 90918392-90935407 | chr1: 90928918-90928937 | AUACUUGAUCUUUUCCCACU | + |
| 2409 | 84146 | ZNF644 | intron_09 | chr1: 90918392-90935407 | chr1: 90928865-90928884 | CAUCCUUCAACUUCAGGGUC | + |
| 2410 | 84146 | ZNF644 | intron_09 | chr1: 90918392-90935407 | chr1: 90928871-90928890 | CAGCCAGACCCUGAAGUUGA | − |
| 2411 | 84146 | ZNF644 | intron_09 | chr1: 90918392-90935407 | chr1: 90928794-90928813 | AGAACAUAGUGUGGACACAA | − |
| 2412 | 84146 | ZNF644 | intron_09 | chr1: 90918392-90935407 | chr1: 90928782-90928801 | GGACACAAAGGGAUGAAAUU | − |
| 2413 | 84146 | ZNF644 | intron_09 | chr1: 90918392-90935407 | chr1: 90928693-90928712 | AAAUUGUAGUGCCAGAAAGG | − |
| 2414 | 84146 | ZNF644 | intron_09 | chr1: 90918392-90935407 | chr1: 90928687-90928706 | UAGUGCCAGAAAGGUGGGGU | − |
| 2415 | 84146 | ZNF644 | intron_09 | chr1: 90918392-90935407 | chr1: 90928671-90928690 | GGGUUGGUGCUUUGAAUGCU | − |
| 2416 | 84146 | ZNF644 | intron_09 | chr1: 90918392-90935407 | chr1: 90928644-90928663 | AAAAAUUAGGAAGUCAUUAA | − |
| 2417 | 84146 | ZNF644 | intron_09 | chr1: 90918392-90935407 | chr1: 90927534-90927553 | AUCAAGUUAUUAACAGUUAA | + |
| 2418 | 84146 | ZNF644 | intron_09 | chr1: 90918392-90935407 | chr1: 90927502-90927521 | UGGAGCAAUAACCACCAAAA | + |
| 2419 | 84146 | ZNF644 | intron_09 | chr1: 90918392-90935407 | chr1: 90927128-90927147 | AUGCUAAUUCCAAAAGCCUU | + |
| 2420 | 84146 | ZNF644 | intron_09 | chr1: 90918392-90935407 | chr1: 90927096-90927115 | UUUCAGUUAGCUAUACAUCA | + |
| 2421 | 84146 | ZNF644 | intron_09 | chr1: 90918392-90935407 | chr1: 90926915-90926934 | GUUGGAAUUAACUUUGUAGU | − |
| 2422 | 84146 | ZNF644 | intron_09 | chr1: 90918392-90935407 | chr1: 90926785-90926804 | UAAUGUCACUGACCUGGUAC | + |
| 2423 | 84146 | ZNF644 | intron_09 | chr1: 90918392-90935407 | chr1: 90926773-90926792 | UGACAUUAAGAAUGUAAAGG | − |
| 2424 | 84146 | ZNF644 | intron_09 | chr1: 90918392-90935407 | chr1: 90926626-90926645 | CAAUCUGCUACCAUGCUGUC | − |
| 2425 | 84146 | ZNF644 | intron_09 | chr1: 90918392-90935407 | chr1: 90926619-90926638 | CUACCAUGCUGUCUGGUAGA | − |
| 2426 | 84146 | ZNF644 | intron_09 | chr1: 90918392-90935407 | chr1: 90926520-90926539 | UUGUAGAUCUCCUGCUUUUA | + |
| 2427 | 84146 | ZNF644 | intron_09 | chr1: 90918392-90935407 | chr1: 90926533-90926552 | CAAAGUAUCACCUUAAAAGC | − |
| 2428 | 84146 | ZNF644 | intron_09 | chr1: 90918392-90935407 | chr1: 90926284-90926303 | AACAUGGGAUGUAUGUAACA | + |
| 2429 | 84146 | ZNF644 | intron_09 | chr1: 90918392-90935407 | chr1: 90926158-90926177 | GAUCACCAACUGGUUCUAGC | + |
| 2430 | 84146 | ZNF644 | intron_09 | chr1: 90918392-90935407 | chr1: 90925731-90925750 | GCUUGUUUUUUGCUGCUCAU | − |
| 2431 | 84146 | ZNF644 | intron_09 | chr1: 90918392-90935407 | chr1: 90925717-90925736 | GCUCAUUGGUUUCAUAAGGA | − |
| 2432 | 84146 | ZNF644 | intron_09 | chr1: 90918392-90935407 | chr1: 90925186-90925205 | GACUCUCAUGCCCCCCACUG | + |
| 2433 | 84146 | ZNF644 | intron_09 | chr1: 90918392-90935407 | chr1: 90925081-90925100 | AGAAAUUCAUGUUAGAGAGA | + |
| 2434 | 84146 | ZNF644 | intron_09 | chr1: 90918392-90935407 | chr1: 90925075-90925094 | UAACAUGAAUUUCUUGAAUG | − |
| 2435 | 84146 | ZNF644 | intron_09 | chr1: 90918392-90935407 | chr1: 90925021-90925040 | CAUGCCUUGUUAUAUUAUAA | + |
| 2436 | 84146 | ZNF644 | intron_09 | chr1: 90918392-90935407 | chr1: 90925028-90925047 | UUAGCCCUUAUAAUAUAACA | − |
| 2437 | 84146 | ZNF644 | intron_09 | chr1: 90918392-90935407 | chr1: 90924999-90925018 | GUUGGCCAGAGCUAAAUUUU | − |
| 2438 | 84146 | ZNF644 | intron_09 | chr1: 90918392-90935407 | chr1: 90924976-90924995 | UAAUGUUUUAAUUGACUUUA | − |
| 2439 | 84146 | ZNF644 | intron_09 | chr1: 90918392-90935407 | chr1: 90924933-90924952 | GACUUUCUCUAUUGGAGGUU | − |
| 2440 | 84146 | ZNF644 | intron_09 | chr1: 90918392-90935407 | chr1: 90924932-90924951 | ACUUUCUCUAUUGGAGGUUA | − |
| 2441 | 84146 | ZNF644 | intron_09 | chr1: 90918392-90935407 | chr1: 90924909-90924928 | CAAAAGGAUGGCUUAUUGGU | − |
| 2442 | 84146 | ZNF644 | intron_09 | chr1: 90918392-90935407 | chr1: 90924878-90924897 | UUCUACUUCUGCAGUAAGUG | + |
| 2443 | 84146 | ZNF644 | intron_09 | chr1: 90918392-90935407 | chr1: 90924816-90924835 | AACCUCAUUCUUCAAACCCU | + |
| 2444 | 84146 | ZNF644 | intron_09 | chr1: 90918392-90935407 | chr1: 90924766-90924785 | AUUGUAGCUUAGCUGGAAGU | − |
| 2445 | 84146 | ZNF644 | intron_09 | chr1: 90918392-90935407 | chr1: 90924692-90924711 | UGGCUGGAAUUACACGUGUA | − |
| 2446 | 84146 | ZNF644 | intron_09 | chr1: 90918392-90935407 | chr1: 90924446-90924465 | UACGGAGAUUUUAGAGGGCA | − |
| 2447 | 84146 | ZNF644 | intron_09 | chr1: 90918392-90935407 | chr1: 90924341-90924360 | UCAGAUGUGUCUUACAAAAG | − |
| 2448 | 84146 | ZNF644 | intron_09 | chr1: 90918392-90935407 | chr1: 90924224-90924243 | UAUUACUUCUUUGUGGUGAC | + |
| 2449 | 84146 | ZNF644 | intron_09 | chr1: 90918392-90935407 | chr1: 90924152-90924171 | AUUGUUAGCUUUUUUAGCUU | − |
| 2450 | 84146 | ZNF644 | intron_09 | chr1: 90918392-90935407 | chr1: 90924010-90924029 | GUAGAGGGGAUGAUUACUAA | + |
| 2451 | 84146 | ZNF644 | intron_09 | chr1: 90918392-90935407 | chr1: 90923942-90923961 | UCCAUUCAAGUUUAAAUAAA | − |
| 2452 | 84146 | ZNF644 | intron_09 | chr1: 90918392-90935407 | chr1: 90923904-90923923 | UAGUUCAGAGAAAGAGUUAA | + |
| 2453 | 84146 | ZNF644 | intron_09 | chr1: 90918392-90935407 | chr1: 90923902-90923921 | AACUCUUUCUCUGAACUAUA | − |
| 2454 | 84146 | ZNF644 | intron_09 | chr1: 90918392-90935407 | chr1: 90923864-90923883 | AAUUUAACUUCCUACUUUGU | − |
| 2455 | 84146 | ZNF644 | intron_09 | chr1: 90918392-90935407 | chr1: 90923837-90923856 | ACUCAAGCAACCAGUCCUUG | − |
| 2456 | 84146 | ZNF644 | intron_09 | chr1: 90918392-90935407 | chr1: 90923778-90923797 | GCAAAGGAAAUCUGCUUUCC | − |
| 2457 | 84146 | ZNF644 | intron_09 | chr1: 90918392-90935407 | chr1: 90923752-90923771 | UUUGCAUUUCAUCCUCUUCC | − |
| 2458 | 84146 | ZNF644 | intron_09 | chr1: 90918392-90935407 | chr1: 90923731-90923750 | GGUAAAUUAUUAAAACAAGC | − |
| 2459 | 84146 | ZNF644 | intron_09 | chr1: 90918392-90935407 | chr1: 90923690-90923709 | CUCAAUCACACAGCAAUCAG | + |
| 2460 | 84146 | ZNF644 | intron_09 | chr1: 90918392-90935407 | chr1: 90923477-90923496 | AUAAUGUAAACUACUCAUCU | − |
| 2461 | 84146 | ZNF644 | intron_09 | chr1: 90918392-90935407 | chr1: 90923453-90923472 | AAUAAUGAAGUGGUAUAGCU | − |
| 2462 | 84146 | ZNF644 | intron_09 | chr1: 90918392-90935407 | chr1: 90923424-90923443 | GAACUGAUGUUGAUAGGAGU | − |
| 2463 | 84146 | ZNF644 | intron_09 | chr1: 90918392-90935407 | chr1: 90923422-90923441 | ACUGAUGUUGAUAGGAGUAG | − |
| 2464 | 84146 | ZNF644 | intron_09 | chr1: 90918392-90935407 | chr1: 90923323-90923342 | UGGGCCGAGAGAUUGAGGGG | − |
| 2465 | 84146 | ZNF644 | intron_09 | chr1: 90918392-90935407 | chr1: 90923273-90923292 | AUAGUAGAUACUCAGGUCCC | − |
| 2466 | 84146 | ZNF644 | intron_09 | chr1: 90918392-90935407 | chr1: 90923230-90923249 | CCACAUAACUCAUUUUGCAU | + |
| 2467 | 84146 | ZNF644 | intron_09 | chr1: 90918392-90935407 | chr1: 90922956-90922975 | CCUCAAAUGAAAAAGAAUCA | + |
| 2468 | 84146 | ZNF644 | intron_09 | chr1: 90918392-90935407 | chr1: 90922955-90922974 | GCCUCAAAUGAAAAAGAAUC | + |
| 2469 | 84146 | ZNF644 | intron_09 | chr1: 90918392-90935407 | chr1: 90922959-90922978 | CCCUGAUUCUUUUUCAUUUG | − |
| 2470 | 84146 | ZNF644 | intron_09 | chr1: 90918392-90935407 | chr1: 90922914-90922933 | UGCAGUCUUUUUAUAUGCUU | − |
| 2471 | 84146 | ZNF644 | intron_09 | chr1: 90918392-90935407 | chr1: 90922879-90922898 | CUGUUGUCACUAAUCCUUCA | + |
| 2472 | 84146 | ZNF644 | intron_09 | chr1: 90918392-90935407 | chr1: 90922640-90922659 | AGGUAAAUUGUCACGGGAGU | + |
| 2473 | 84146 | ZNF644 | intron_09 | chr1: 90918392-90935407 | chr1: 90922550-90922569 | UCUUACACUUGUGUAUCCUU | − |
| 2474 | 84146 | ZNF644 | intron_09 | chr1: 90918392-90935407 | chr1: 90922503-90922522 | AGGUCGUGCUGGCAGUGGUG | + |
| 2475 | 84146 | ZNF644 | intron_09 | chr1: 90918392-90935407 | chr1: 90922480-90922499 | CACUAUUAAAAAGUUGGUGC | + |
| 2476 | 84146 | ZNF644 | intron_09 | chr1: 90918392-90935407 | chr1: 90922474-90922493 | UUCUAUCACUAUUAAAAAGU | + |
| 2477 | 84146 | ZNF644 | intron_09 | chr1: 90918392-90935407 | chr1: 90922420-90922439 | AGCUCAUUCAGAACUACAGU | + |
| 2478 | 84146 | ZNF644 | intron_09 | chr1: 90918392-90935407 | chr1: 90922389-90922408 | UUGUCCACCAAACUUAACAC | − |
| 2479 | 84146 | ZNF644 | intron_09 | chr1: 90918392-90935407 | chr1: 90922336-90922355 | CACAGUAUACCCCUACGAGA | + |
| 2480 | 84146 | ZNF644 | intron_09 | chr1: 90918392-90935407 | chr1: 90922290-90922309 | UAGGACAAAGUGAAACAACU | + |
| 2481 | 84146 | ZNF644 | intron_09 | chr1: 90918392-90935407 | chr1: 90922271-90922290 | AAUUGGUUGCUGGUAUCUCU | + |
| 2482 | 84146 | ZNF644 | intron_09 | chr1: 90918392-90935407 | chr1: 90922235-90922254 | AAACAAGACUUUUAAGUUAU | − |
| 2483 | 84146 | ZNF644 | intron_09 | chr1: 90918392-90935407 | chr1: 90922234-90922253 | AACAAGACUUUUAAGUUAUU | − |
| 2484 | 84146 | ZNF644 | intron_09 | chr1: 90918392-90935407 | chr1: 90922060-90922079 | AAGCAAUUAUUGUAUAAAAU | − |
| 2485 | 84146 | ZNF644 | intron_09 | chr1: 90918392-90935407 | chr1: 90921764-90921783 | AAGACAAAUAUCUUACUGAA | − |
| 2486 | 84146 | ZNF644 | intron_09 | chr1: 90918392-90935407 | chr1: 90921688-90921707 | CUGAGAAUAUUUUACUCAUA | + |
| 2487 | 84146 | ZNF644 | intron_09 | chr1: 90918392-90935407 | chr1: 90921637-90921656 | CUUGAAAGAUAACAGUCUUU | − |
| 2488 | 84146 | ZNF644 | intron_09 | chr1: 90918392-90935407 | chr1: 90921578-90921597 | AUAGUAAUCUUAGGAAGGUU | − |
| 2489 | 84146 | ZNF644 | intron_09 | chr1: 90918392-90935407 | chr1: 90921570-90921589 | CUUAGGAAGGUUUGGAUGAC | − |
| 2490 | 84146 | ZNF644 | intron_09 | chr1: 90918392-90935407 | chr1: 90921438-90921457 | UGUAAAGAGAAAAGAGUGUG | − |
| 2491 | 84146 | ZNF644 | intron_09 | chr1: 90918392-90935407 | chr1: 90921355-90921374 | ACAAAGCCUUUUUUUGUAAU | + |
| 2492 | 84146 | ZNF644 | intron_09 | chr1: 90918392-90935407 | chr1: 90921224-90921243 | AUCUGUAUUUAAUGUUCUAG | − |
| 2493 | 84146 | ZNF644 | intron_09 | chr1: 90918392-90935407 | chr1: 90921217-90921236 | UUUAAUGUUCUAGUGGCUCC | − |
| 2494 | 84146 | ZNF644 | intron_09 | chr1: 90918392-90935407 | chr1: 90921185-90921204 | AGGGAAAAGUAGUUUUGUUC | + |
| 2495 | 84146 | ZNF644 | intron_09 | chr1: 90918392-90935407 | chr1: 90921165-90921184 | AGAGAUUUUAUUAUAUCUAG | + |
| 2496 | 84146 | ZNF644 | intron_09 | chr1: 90918392-90935407 | chr1: 90921152-90921171 | AAUCUCUUAAGUGAGAAUAU | − |
| 2497 | 84146 | ZNF644 | intron_09 | chr1: 90918392-90935407 | chr1: 90921077-90921096 | UAAAUCAUCCUUUUAUGUAG | − |
| 2498 | 84146 | ZNF644 | intron_09 | chr1: 90918392-90935407 | chr1: 90921034-90921053 | CAUAUUAAAACUGCACAAAA | + |
| 2499 | 84146 | ZNF644 | intron_09 | chr1: 90918392-90935407 | chr1: 90920996-90921015 | ACAGAUUUUCCCAAAGGUAU | − |
| 2500 | 84146 | ZNF644 | intron_09 | chr1: 90918392-90935407 | chr1: 90920984-90921003 | AAAGGUAUGGGCAGUAUCAC | − |
| 2501 | 84146 | ZNF644 | intron_09 | chr1: 90918392-90935407 | chr1: 90920979-90920998 | UAUGGGCAGUAUCACAGGAG | − |
| 2502 | 84146 | ZNF644 | intron_09 | chr1: 90918392-90935407 | chr1: 90920966-90920985 | ACAGGAGUGGGUUUGGAUAU | − |
| 2503 | 84146 | ZNF644 | intron_09 | chr1: 90918392-90935407 | chr1: 90920903-90920922 | GCUCAAAAAUAUAACAUUUC | − |
| 2504 | 84146 | ZNF644 | intron_09 | chr1: 90918392-90935407 | chr1: 90920793-90920812 | AACUUUGUGAAUAAGUUUCU | − |
| 2505 | 84146 | ZNF644 | intron_09 | chr1: 90918392-90935407 | chr1: 90920746-90920765 | AACCUUAACUUUGGAGCCCU | − |
| 2506 | 84146 | ZNF644 | intron_09 | chr1: 90918392-90935407 | chr1: 90920727-90920746 | UCAAUCAUCUCUAGAACCCA | + |
| 2507 | 84146 | ZNF644 | intron_09 | chr1: 90918392-90935407 | chr1: 90920680-90920699 | GUAUUAUAACCUUGGAAAGC | + |
| 2508 | 84146 | ZNF644 | intron_09 | chr1: 90918392-90935407 | chr1: 90920658-90920677 | UUGUAGCAAUGAGUAUUUGA | + |
| 2509 | 84146 | ZNF644 | intron_09 | chr1: 90918392-90935407 | chr1: 90920371-90920390 | UAGGGGUGUAAAGCAAAUUG | + |
| 2510 | 84146 | ZNF644 | intron_09 | chr1: 90918392-90935407 | chr1: 90920352-90920371 | GUUCACAGAAUGUUAAUGUU | + |
| 2511 | 84146 | ZNF644 | intron_09 | chr1: 90918392-90935407 | chr1: 90920163-90920182 | GAUGGAUCCUUGUCUGUGUU | + |
| 2512 | 84146 | ZNF644 | intron_09 | chr1: 90918392-90935407 | chr1: 90920052-90920071 | UGAGCAAUCUGAAUUUAAGU | + |
| 2513 | 84146 | ZNF644 | intron_09 | chr1: 90918392-90935407 | chr1: 90920051-90920070 | GUGAGCAAUCUGAAUUUAAG | + |
| 2514 | 84146 | ZNF644 | intron_09 | chr1: 90918392-90935407 | chr1: 90920029-90920048 | AACCUUUUUCCUAAUCGCUU | + |
| 2515 | 84146 | ZNF644 | intron_09 | chr1: 90918392-90935407 | chr1: 90920020-90920039 | GGAAAAAGGUUUUUCCUACU | − |
| 2516 | 84146 | ZNF644 | intron_09 | chr1: 90918392-90935407 | chr1: 90919847-90919866 | GAAUAUUACCUGUAUUAAAU | − |
| 2517 | 84146 | ZNF644 | intron_09 | chr1: 90918392-90935407 | chr1: 90919667-90919686 | AAAGCUAAACAACCAAACUC | + |
| 2518 | 84146 | ZNF644 | intron_09 | chr1: 90918392-90935407 | chr1: 90919638-90919657 | CAAGUUAGGUAUUAAAGAAU | + |
| 2519 | 84146 | ZNF644 | intron_09 | chr1: 90918392-90935407 | chr1: 90919637-90919656 | UCAAGUUAGGUAUUAAAGAA | + |
| 2520 | 84146 | ZNF644 | intron_09 | chr1: 90918392-90935407 | chr1: 90919600-90919619 | CUUAUUAGACUCUUCUUCUA | − |
| 2521 | 84146 | ZNF644 | intron_09 | chr1: 90918392-90935407 | chr1: 90919510-90919529 | CUAAAUCUCAUUGAAGCCAC | + |
| 2522 | 84146 | ZNF644 | intron_09 | chr1: 90918392-90935407 | chr1: 90919440-90919459 | AACAUAGUUCCUUAGUCAAA | + |
| 2523 | 84146 | ZNF644 | intron_09 | chr1: 90918392-90935407 | chr1: 90919330-90919349 | CUCUUACUUAGAAUUUUUCC | − |
| 2524 | 84146 | ZNF644 | intron_09 | chr1: 90918392-90935407 | chr1: 90919311-90919330 | CAGGGAAUUUUUCACAUGGC | − |
| 2525 | 84146 | ZNF644 | intron_09 | chr1: 90918392-90935407 | chr1: 90919270-90919289 | UAACAGAAGAGUUACCCAAA | + |
| 2526 | 84146 | ZNF644 | intron_09 | chr1: 90918392-90935407 | chr1: 90919237-90919256 | CUGUAGGGAUCCAAGGGGGG | + |
| 2527 | 84146 | ZNF644 | intron_09 | chr1: 90918392-90935407 | chr1: 90919234-90919253 | UAUCUGUAGGGAUCCAAGGG | + |
| 2528 | 84146 | ZNF644 | intron_09 | chr1: 90918392-90935407 | chr1: 90919232-90919251 | UUUAUCUGUAGGGAUCCAAG | + |
| 2529 | 84146 | ZNF644 | intron_09 | chr1: 90918392-90935407 | chr1: 90919194-90919213 | GGUGCUGCUGGUCAAUUAGC | + |
| 2530 | 84146 | ZNF644 | intron_09 | chr1: 90918392-90935407 | chr1: 90919182-90919201 | AUAGCAAUCCAGGGUGCUGC | + |
| 2531 | 84146 | ZNF644 | intron_09 | chr1: 90918392-90935407 | chr1: 90919172-90919191 | CAAAGGGAUGAUAGCAAUCC | + |
| 2532 | 84146 | ZNF644 | intron_09 | chr1: 90918392-90935407 | chr1: 90919005-90919024 | GAACAGUUCACAUAAAAUUU | − |
| 2533 | 84146 | ZNF644 | intron_09 | chr1: 90918392-90935407 | chr1: 90918735-90918754 | AUGCUGGCCCUACAUUUGAA | + |
| 2534 | 84146 | ZNF644 | intron_09 | chr1: 90918392-90935407 | chr1: 90918593-90918612 | UGAUUACUGCUCCAUUAAGU | + |
| 2535 | 84146 | ZNF644 | intron_09 | chr1: 90918392-90935407 | chr1: 90918467-90918486 | UUGGUCAAUUAUUACAAUAA | + |
| 2536 | 84146 | ZNF644 | intron_09 | chr1: 90918392-90935407 | chr1: 90918448-90918467 | AUAACUUGAAAGUACUAAAU | + |
| 2537 | 84146 | ZNF644 | intron_09 | chr1: 90918392-90935407 | chr1: 90918397-90918416 | UGGUAAAGCAUUAUUUGAAA | − |
| 2538 | 84146 | ZNF644 | exon_10_nc.1 | chr1: 90918155-90918391 | chr1: 90918281-90918300 | GAAUGCAUGCUUCAGGGAAU | − |
| 2539 | 84146 | ZNF644 | exon_10_nc.1 | chr1: 90918155-90918391 | chr1: 90918244-90918263 | CUUUUUCUAACUGAUUUAGA | − |
| 2540 | 84146 | ZNF644 | exon_10_nc.1 | chr1: 90918155-90918391 | chr1: 90918209-90918228 | ACACACAUAUUUUUCUAGAG | + |
| 2541 | 84146 | ZNF644 | exon_10_c.1/nc.2 | chr1: 90918052-90918154 | chr1: 90918132-90918151 | UUUCUUUUGCUUACAAUCUA | + |
| 2542 | 84146 | ZNF644 | exon_10_c.1/nc.2 | chr1: 90918052-90918154 | chr1: 90918118-90918137 | AAGAAAUCAAGGUCAAGAUC | − |
| 2543 | 84146 | ZNF644 | exon_10_c.1/nc.2 | chr1: 90918052-90918154 | chr1: 90918074-90918093 | AUUACCUCAUGGUGCUGACG | − |
| 2544 | 84146 | ZNF644 | exon_10_c.1/nc.2 | chr1: 90918052-90918154 | chr1: 90918054-90918073 | AGGUUUACAUUCUCCGAUGC | − |
| 2545 | 84146 | ZNF644 | exon_10_c.1/nc.2 | chr1: 90918052-90918154 | chr1: 90918038-90918057 | AUAUAGGCAUAUACCUGCAU | + |
| 2546 | 84146 | ZNF644 | intron_10 | chr1: 90916991-90918051 | chr1: 90918022-90918041 | CUGAUCAGAUUUGGCAAUAU | + |
| 2547 | 84146 | ZNF644 | intron_10 | chr1: 90916991-90918051 | chr1: 90917822-90917841 | UAAUAGAUUUACAUUACUAU | + |
| 2548 | 84146 | ZNF644 | intron_10 | chr1: 90916991-90918051 | chr1: 90917799-90917818 | UGUGAUUUAUUAAAGUAGCU | − |
| 2549 | 84146 | ZNF644 | intron_10 | chr1: 90916991-90918051 | chr1: 90917375-90917394 | GGAAGAAGGCGUGACUAUGA | + |
| 2550 | 84146 | ZNF644 | intron_10 | chr1: 90916991-90918051 | chr1: 90917374-90917393 | CGGAAGAAGGCGUGACUAUG | + |
| 2551 | 84146 | ZNF644 | intron_10 | chr1: 90916991-90918051 | chr1: 90917361-90917380 | GUGAGUGUGAGUACGGAAGA | + |
| 2552 | 84146 | ZNF644 | intron_10 | chr1: 90916991-90918051 | chr1: 90917306-90917325 | AUUUAAGGAAUGCUAAACUG | − |
| 2553 | 84146 | ZNF644 | intron_10 | chr1: 90916991-90918051 | chr1: 90917184-90917203 | UCCAGUAAUCUUUGUAUAGG | + |
| 2554 | 84146 | ZNF644 | exon_11_c.1/nc.1 | chr1: 90916801-90916990 | chr1: 90916943-90916962 | CAGUCUUCCUGAACAGACAA | + |
| 2555 | 84146 | ZNF644 | exon_11_c.1/nc.1 | chr1: 90916801-90916990 | chr1: 90916945-90916964 | CCUUGUCUGUUCAGGAAGAC | − |
| 2556 | 84146 | ZNF644 | exon_11_c.1/nc.1 | chr1: 90916801-90916990 | chr1: 90916880-90916899 | ACCAUGCCAGCUCCAGUCCG | + |
| 2557 | 84146 | ZNF644 | exon_11_c.1/nc.1 | chr1: 90916801-90916990 | chr1: 90916881-90916900 | ACGGACUGGAGCUGGCAUGG | − |
| 2558 | 84146 | ZNF644 | exon_11_c.1/nc.1 | chr1: 90916801-90916990 | chr1: 90916792-90916811 | CUGGUUCUAUGAAGCUGCUU | + |
| 2559 | 84146 | ZNF644 | exon_11_nc.3 | chr1: 90916490-90916790 | chr1: 90916753-90916772 | AAUUUACAUCCAAUUCAAAC | + |
| 2560 | 84146 | ZNF644 | exon_11_nc.3 | chr1: 90916490-90916790 | chr1: 90916765-90916784 | UUUAAAUAGCCAGUUUGAAU | − |
| 2561 | 84146 | ZNF644 | exon_11_nc.3 | chr1: 90916490-90916790 | chr1: 90916688-90916707 | UACUAAAGCAGGAAAAUGGG | − |
| 2562 | 84146 | ZNF644 | exon_11_nc.3 | chr1: 90916490-90916790 | chr1: 90916616-90916635 | GUAGUCUAUAUAUUUUAUAU | − |
| 2563 | 84146 | ZNF644 | exon_11_nc.3 | chr1: 90916490-90916790 | chr1: 90916509-90916528 | CAUGUGCAACAGUUUAUUAA | + |
| 2564 | 84146 | ZNF644 | exon_11_nc.3 | chr1: 90916490-90916790 | chr1: 90916488-90916507 | AUACUUAUAGACAGACUUAU | − |
| 2565 | 84146 | ZNF644 | exon_11_nc.4 | chr1: 90916390-90916489 | chr1: 90916452-90916471 | UUGCAGUGUUACCAGAAUCA | − |
| 2566 | 84146 | ZNF644 | exon_11_nc.4 | chr1: 90916390-90916489 | chr1: 90916414-90916433 | UUUUUCUAUGCAAGUCUUGU | + |
| 2567 | 84146 | ZNF644 | exon_11_nc.6 | chr1: 90915306-90916184 | chr1: 90916156-90916175 | AAGAAAUAUGUACAUAGUUC | − |
| 2568 | 84146 | ZNF644 | exon_11_nc.6 | chr1: 90915306-90916184 | chr1: 90916138-90916157 | UCUGGAAAUUAUUUGUGGUA | − |
| 2569 | 84146 | ZNF644 | exon_11_nc.6 | chr1: 90915306-90916184 | chr1: 90915621-90915640 | AAAAUAUGGUGCAGGUGUCU | − |
| 2570 | 84146 | ZNF644 | exon_11_nc.6 | chr1: 90915306-90916184 | chr1: 90915493-90915512 | CCAUUUUAUUUCAUGUAGUA | − |
| 2571 | 84146 | ZNF644 | exon_11_nc.6 | chr1: 90915306-90916184 | chr1: 90915450-90915469 | AAAGAAUCAAUGCAUAUCCU | + |
| 2572 | 84146 | ZNF644 | exon_11_nc.6 | chr1: 90915306-90916184 | chr1: 90915354-90915373 | CCAUAGGAAAGCAAUUUCAC | + |
| 2573 | 84146 | ZNF644 | exon_11_nc.6 | chr1: 90915306-90916184 | chr1: 90915357-90915376 | CCAGUGAAAUUGCUUUCCUA | − |
| 2574 | 84146 | ZNF644 | exon_11_nc.6 | chr1: 90915306-90916184 | chr1: 90915324-90915343 | AUUUAGAGAUUUUUCUGGUA | + |

TABLE 3

| SEQ | target_ | | target_ | target_ | gRNA_target_ | | |
|---|---|---|---|---|---|---|---|
| ID | gene_ | target_ | region_ | region_ | site_ | gRNA Targeting | |
| NO | id | symbol | name | coordinates | coordinates | Domain | strand |
| 2575 | 84146 | ZNF644 | promoter1.2 | chr1: | chr1: | CUCUGCAAGACCCAAGCACU | + |
| | | | | 91022273- | 91022379- | | |
| | | | | 91023899 | 91022398 | | |
| 2576 | 84146 | ZNF644 | intron_04 | chr1: | chr1: | GAAAUUGAACUGAACCGUAA | − |
| | | | | 90982371- | 91013641- | | |
| | | | | 91020447 | 91013660 | | |
| 2577 | 84146 | ZNF644 | intron_04 | chr1: | chr1: | AAGCACAGACAUGAGAAUUG | − |
| | | | | 90982371- | 91012692- | | |
| | | | | 91020447 | 91012711 | | |
| 2578 | 84146 | ZNF644 | intron_04 | chr1: | chr1: | GGUUUUUGGAGCCUCUUUGA | − |
| | | | | 90982371- | 91011876- | | |
| | | | | 91020447 | 91011895 | | |
| 2579 | 84146 | ZNF644 | intron_04 | chr1: | chr1: | AAGACAAAUACUGAAAUCCC | + |
| | | | | 90982371- | 91011211- | | |
| | | | | 91020447 | 91011230 | | |
| 2580 | 84146 | ZNF644 | intron_04 | chr1: | chr1: | GUCAAUAUAAAAUAACUCCU | − |
| | | | | 90982371- | 90993591- | | |
| | | | | 91020447 | 90993610 | | |
| 2581 | 84146 | ZNF644 | intron_04 | chr1: | chr1: | GAGUCACCCAAAAGGAUGAA | + |
| | | | | 90982371- | 90990719- | | |
| | | | | 91020447 | 90990738 | | |
| 2582 | 84146 | ZNF644 | intron_04 | chr1: | chr1: | AUUAAAGAAAACAUAGGGGA | + |
| | | | | 90982371- | 90988931- | | |
| | | | | 91020447 | 90988950 | | |
| 2583 | 84146 | ZNF644 | intron_05 | chr1: | chr1: | AUAUUCCUAGUUCUAGUCCU | − |
| | | | | 90973214- | 90980348- | | |
| | | | | 90982309 | 90980367 | | |
| 2584 | 84146 | ZNF644 | intron_05 | chr1: | chr1: | AUUCUGAAUCUCUAUUUGCC | + |
| | | | | 90973214- | 90980058- | | |
| | | | | 90982309 | 90980077 | | |
| 2585 | 84146 | ZNF644 | intron_05 | chr1: | chr1: | GUAAAAAACUGUUAGGAUGG | − |
| | | | | 90973214- | 90979632- | | |
| | | | | 90982309 | 90979651 | | |
| 2586 | 84146 | ZNF644 | intron_05 | chr1: | chr1: | UUAGGAUAAAUAUUUCCUUA | − |
| | | | | 90973214- | 90977304- | | |
| | | | | 90982309 | 90977323 | | |
| 2587 | 84146 | ZNF644 | intron_05 | chr1: | chr1: | UUCAGUUUAAGUGUCACUUC | + |
| | | | | 90973214- | 90975071- | | |
| | | | | 90982309 | 90975090 | | |
| 2588 | 84146 | ZNF644 | intron_06 | chr1: | chr1: | UAUAAAUAUACACUGUAGUA | + |
| | | | | 90941310- | 90971044- | | |
| | | | | 90972743 | 90971063 | | |
| 2589 | 84146 | ZNF644 | intron_06 | chr1: | chr1: | AUGAGUGGAGUUAAAUUAUU | − |
| | | | | 90941310- | 90969028- | | |
| | | | | 90972743 | 90969047 | | |
| 2590 | 84146 | ZNF644 | intron_06 | chr1: | chr1: | CAUGGACUAGUAGGCAUUUU | + |
| | | | | 90941310- | 90966791- | | |
| | | | | 90972743 | 90966810 | | |
| 2591 | 84146 | ZNF644 | intron_06 | chr1: | chr1: | UCAUGGACUAGUAGGCAUUU | + |
| | | | | 90941310- | 90966790- | | |
| | | | | 90972743 | 90966809 | | |
| 2592 | 84146 | ZNF644 | intron_06 | chr1: | chr1: | GGCCAACUUCAUGGACUAGU | + |
| | | | | 90941310- | 90966782- | | |
| | | | | 90972743 | 90966801 | | |
| 2593 | 84146 | ZNF644 | intron_06 | chr1: | chr1: | UGCCUACUAGUCCAUGAAGU | − |
| | | | | 90941310- | 90966787- | | |
| | | | | 90972743 | 90966806 | | |
| 2594 | 84146 | ZNF644 | intron_06 | chr1: | chr1: | AUAAGCACAUCAGUGAUAAC | + |
| | | | | 90941310- | 90965386- | | |
| | | | | 90972743 | 90965405 | | |
| 2595 | 84146 | ZNF644 | intron_06 | chr1: | chr1: | GUCCAAGACAAAAGUACAGU | + |
| | | | | 90941310- | 90965227- | | |
| | | | | 90972743 | 90965246 | | |
| 2596 | 84146 | ZNF644 | intron_06 | chr1: | chr1: | UACCACUUGGUGGCACUAUG | − |
| | | | | 90941310- | 90964631- | | |
| | | | | 90972743 | 90964650 | | |
| 2597 | 84146 | ZNF644 | intron_06 | chr1: | chr1: | CAAUAGUAAUUUUGUUAAGG | + |
| | | | | 90941310- | 90963182- | | |
| | | | | 90972743 | 90963201 | | |
| 2598 | 84146 | ZNF644 | intron_06 | chr1: | chr1: | GCUCAAUAGUAAUUUUGUUA | + |
| | | | | 90941310- | 90963179- | | |
| | | | | 90972743 | 90963198 | | |
| 2599 | 84146 | ZNF644 | intron_06 | chr1: | chr1: | ACAUUUAACAGACAUGGAGA | + |
| | | | | 90941310- | 90953339- | | |
| | | | | 90972743 | 90953358 | | |
| 2600 | 84146 | ZNF644 | intron_06 | chr1: | chr1: | GACAAAUCAACAGCCACAGA | + |
| | | | | 90941310- | 90950625- | | |
| | | | | 90972743 | 90950644 | | |
| 2601 | 84146 | ZNF644 | intron_08 | chr1: | chr1: | UUAGGCUUUCUGAUGAAGGC | + |
| | | | | 90935529- | 90935987- | | |
| | | | | 90937484 | 90936006 | | |
| 2602 | 84146 | ZNF644 | intron_09 | chr1: | chr1: | UGGCUCUUAUUGACUUAAUU | − |
| | | | | 90918392- | 90935197- | | |
| | | | | 90935407 | 90935216 | | |
| 2603 | 84146 | ZNF644 | intron_09 | chr1: | chr1: | UACCAACCCCUAAGAGAAAG | + |
| | | | | 90918392- | 90930531- | | |
| | | | | 90935407 | 90930550 | | |
| 2604 | 84146 | ZNF644 | intron_09 | chr1: | chr1: | ACGUUAAUAUAUUGCACUAG | + |
| | | | | 90918392- | 90929877- | | |
| | | | | 90935407 | 90929896 | | |
| 2605 | 84146 | ZNF644 | intron_09 | chr1: | chr1: | UAGUCUAAGCCUCCUUUUGA | − |
| | | | | 90918392- | 90929209- | | |
| | | | | 90935407 | 90929228 | | |
| 2606 | 84146 | ZNF644 | intron_09 | chr1: | chr1: | AGGUUAAUUCUUGUUAUCCA | − |
| | | | | 90918392- | 90924801- | | |
| | | | | 90935407 | 90924820 | | |
| 2607 | 84146 | ZNF644 | intron_09 | chr1: | chr1: | UCCCCUCUACUUUGAAAUAG | − |
| | | | | 90918392- | 90924000- | | |
| | | | | 90935407 | 90924019 | | |
| 2608 | 84146 | ZNF644 | intron_09 | chr1: | chr1: | CUACCCUCCACCCUUAAGGU | + |
| | | | | 90918392- | 90922737- | | |
| | | | | 90935407 | 90922756 | | |
| 2609 | 84146 | ZNF644 | intron_09 | chr1: | chr1: | UAUACUGUGCCUCUUACUUU | − |
| | | | | 90918392- | 90922325- | | |
| | | | | 90935407 | 90922344 | | |
| 2610 | 84146 | ZNF644 | intron_09 | chr1: | chr1: | AAACAACUCUGUUAAAGCUU | − |
| | | | | 90918392- | 90921302- | | |
| | | | | 90935407 | 90921321 | | |
| 2611 | 84146 | ZNF644 | intron_09 | chr1: | chr1: | GGCAGAAUAGAGCAGGCAUU | + |
| | | | | 90918392- | 90920184- | | |
| | | | | 90935407 | 90920203 | | |
| 2612 | 84146 | ZNF644 | intron_09 | chr1: | chr1: | AUUUAUCUGUAGGGAUCCAA | + |
| | | | | 90918392- | 90919231- | | |
| | | | | 90935407 | 90919250 | | |
| 2613 | 84146 | ZNF644 | exon_11_ | chr1: | chr1: | AAUAAACAGAGCCUUGAUUC | + |
| | | | nc.4 | 90916390- | 90916438- | | |
| | | | | 90916489 | 90916457 | | |

aacagcauagcaaguuaaaauaaggcuaguccguuaucaacuugaaaaaguggcaccgagucggugcuuuuuuu (SEQ ID NO: 3109)

1. A guide RNA (gRNA) molecule comprising a tracr and crRNA,
wherein the crRNA comprises a targeting domain that is complementary with a target sequence of a zinc finger protein 644 (ZNF644), wherein the targeting domain comprises any one of SEQ ID NO: 1 to SEQ ID NO: 2613.

2-4. (canceled)

5. The gRNA molecule of claim 1, wherein the targeting domain comprises any one of SEQ ID NO: 2634, SEQ ID NO: 2635, SEQ ID NO: 2636, SEQ ID NO: 2637, SEQ ID NO: 2638, SEQ ID NO: 2639, SEQ ID NO: 2640, or SEQ ID NO: 2641.

6-12. (canceled)

13. The gRNA molecule of claim 1, comprising:
(a) SEQ ID NO: 3123;
(b) SEQ ID NO: 3159; or
(c) any of (a) or (b), above, further comprising, at the 3′ end, 1, 2, 3, 4, 5, 6 or 7 uracil (U) nucleotides;
wherein the sequence of any of (a) to (c) is disposed 3′ to the targeting domain.

14. The gRNA molecule of claim 1, comprising:
(a) a tracr comprising SEQ ID NO: 3152; or
(b) a tracr comprising SEQ ID NO: 3109 or 3174;

15-20. (canceled)

21. A composition comprising:
1) the gRNA molecule of claim 1 and a Cas9 molecule;
2) the gRNA molecule of claim 1 and a nucleic acid comprising a nucleotide sequence encoding a Cas9 molecule;
3) a nucleic acid comprising a nucleotide sequence encoding the gRNA molecule of claim 1 and a Cas9 molecule;
4) a nucleic acid comprising a nucleotide sequence encoding the gRNA molecule of claim 1 and a nucleic acid comprising a nucleotide sequence encoding a Cas9 molecule; or
5) any of 1) to 4), above, and a template nucleic acid; or
6) any of 1) to 4) above, and a nucleic acid comprising a nucleotide sequence encoding a template nucleic acid.

22. The composition of claim 21, wherein the Cas9 molecule:
a) is an active or inactive S. pyogenes Cas9; or
(b) comprises SEQ ID NO: 3133, SEQ ID NO: 3161, SEQ ID NO: 3162, SEQ ID NO: 3163, SEQ ID NO: 3164, SEQ ID NO: 3165, SEQ ID NO: 3166, SEQ ID NO: 3167, SEQ ID NO: 3168, SEQ ID NO: 3169, SEQ ID NO: 3170, SEQ ID NO: 3171, or SEQ ID NO: 3172.

23-26. (canceled)

27. A nucleic acid that encodes the gRNA molecule of claim 1.

28. A vector comprising the nucleic acid of claim 27.

29. A method of altering a cell at or near a target sequence within said cell, comprising contacting said cell with:
1) the gRNA molecule of claim 1 and a Cas9 molecule;
2) the gRNA molecule of claim 1 and a nucleic acid comprising a nucleotide sequence encoding a Cas9 molecule;
3) a nucleic acid comprising a nucleotide sequence encoding the gRNA molecule of claim 1 and a Cas9 molecule;
4) a nucleic acid comprising a nucleotide sequence encoding the gRNA molecule of claim 1 and a nucleic acid comprising a nucleotide sequence encoding a Cas9 molecule;
5) any of 1) to 4), above, and a template nucleic acid;
6) any of 1) to 4) above, and a nucleic acid comprising a nucleotide sequence encoding a template nucleic acid;
7) the composition of claim 21; or
8) the vector of claim 28.

30-36. (canceled)

37. A cell, altered by the method of claim 29.

38. A cell, comprising the gRNA molecule of claim 1.

39-42. (canceled)

43. The cell of claim 37, wherein the cell is:
(a) an animal cell,
(b) a mammalian, primate, or human cell,
(c) a cell obtained from a patient suffering from a hemoglobinopathy,
(d) a cell obtained from a patient suffering from sickle cell disease or a thalassemia
(e) an HSPC, a CD34+ HSPC, or a CD34+CD90+ HSPC,
(f) a cell that has been isolated from bone marrow, peripheral blood, or umbilical cord blood, or
(g) a cell that is autologous or allogeneic with respect to a patient to be administered said cell.

44-46. (canceled)

47. A population of cells comprising the cell of claim 37, wherein at least about 50% of the cells of the population are a cell according to claim 37.

48. (canceled)

49. The population of cells of claim 47, comprising:
1) at least 1e6 CD34+ cells/kg body weight of the patient to whom the cells are to be administered;
2) at least 2e6 CD34+ cells/kg body weight of the patient to whom the cells are to be administered;
3) at least 3e6 CD34+ cells/kg body weight of the patient to whom the cells are to be administered;
4) at least 4e6 CD34+ cells/kg body weight of the patient to whom the cells are to be administered; or
5) from 2e6 to 10e6 CD34+ cells/kg body weight of the patient to whom the cells are to be administered.

50-53. (canceled)

54. A composition comprising the cell of claim 37 and a pharmaceutically acceptable medium.

55. A method of treating a hemoglobinopathy, comprising administering to a patient the cell of claim 37.

56. A method of increasing fetal hemoglobin expression in a mammal, comprising administering to a patient the cell of claim 37.

57. The method of claim 55, wherein the hemoglobinopathy is beta-thalassemia or sickle cell disease.

58. A method of increasing fetal hemoglobin expression in a subject comprising administering to the subject a composition that reduces ZNF644 gene expression and/or ZNF644 protein activity, wherein the composition comprises a small molecule compound, siRNA, shRNA, antisense oligonucleotide (ASO), miRNA, anti-microRNA oligonucleotide (AMO) or any combination thereof.

59-89. (canceled)

90. A method of treating a hemoglobinopathy in a subject, comprising administering to the subject a composition that reduces ZNF644 gene expression and/or ZNF644 protein activity, wherein the composition that reduces ZNF644 gene expression and/or ZNF644 protein activity comprises a small molecule compound, siRNA, shRNA, ASO, miRNA, AMO, or any combination thereof.

91. (canceled)

The application's sequence listing, which the Patent Office published only in electronic form, follows.

SEQUENCE LISTING (3188 sequences)

SEQ ID NO: 1 - RNA, 20 nt, Artificial Sequence
  Description of Artificial Sequence: Synthetic oligonucleotide
aaauacaggaugauaguucg

SEQ ID NO: 2 - RNA, 20 nt, Artificial Sequence
  Description of Artificial Sequence: Synthetic oligonucleotide
ugaugaaacgcuguacaaaa

SEQ ID NO: 3 - RNA, 20 nt, Artificial Sequence
  Description of Artificial Sequence: Synthetic oligonucleotide
gugagacaaguuccugauca

SEQ ID NO: 4 - RNA, 20 nt, Artificial Sequence
  Description of Artificial Sequence: Synthetic oligonucleotide
uuugucugcacauuagucag

SEQ ID NO: 5 - RNA, 20 nt, Artificial Sequence
  Description of Artificial Sequence: Synthetic oligonucleotide
ggacauucucaguuuacuau

SEQ ID NO: 6 - RNA, 20 nt, Artificial Sequence
  Description of Artificial Sequence: Synthetic oligonucleotide
aaugggggaggggugcucuu

SEQ ID NO: 7 - RNA, 20 nt, Artificial Sequence
  Description of Artificial Sequence: Synthetic oligonucleotide
uauuugcagucaauggggga

SEQ ID NO: 8 - RNA, 20 nt, Artificial Sequence
  Description of Artificial Sequence: Synthetic oligonucleotide
auauuugcagucaauggggg

SEQ ID NO: 9 - RNA, 20 nt, Artificial Sequence
  Description of Artificial Sequence: Synthetic oligonucleotide
cguauauauuugcagucaau

SEQ ID NO: 10 - RNA, 20 nt, Artificial Sequence
  Description of Artificial Sequence: Synthetic oligonucleotide
acguauauauuugcagucaa

SEQ ID NO: 11 - RNA, 20 nt, Artificial Sequence
  Description of Artificial Sequence: Synthetic oligonucleotide
ucgaagucauacaguucuuu

SEQ ID NO: 12 - RNA, 20 nt, Artificial Sequence
  Description of Artificial Sequence: Synthetic oligonucleotide
uguaacccaaugagacaaag

SEQ ID NO: 13 - RNA, 20 nt, Artificial Sequence
  Description of Artificial Sequence: Synthetic oligonucleotide
ugcugaaggcaucauuccau

SEQ ID NO: 14 - RNA, 20 nt, Artificial Sequence
  Description of Artificial Sequence: Synthetic oligonucleotide
uugucaaauaaaugcaguua

SEQ ID NO: 15 - RNA, 20 nt, Artificial Sequence
  Description of Artificial Sequence: Synthetic oligonucleotide
cgaaugucaauaacaucuug

SEQ ID NO: 16 - RNA, 20 nt, Artificial Sequence
  Description of Artificial Sequence: Synthetic oligonucleotide
ucaauaacaucuugaggguu

SEQ ID NO: 17 - RNA, 20 nt, Artificial Sequence
  Description of Artificial Sequence: Synthetic oligonucleotide
cuggucccgccuuaauuauu

SEQ ID NO: 18 - RNA, 20 nt, Artificial Sequence
  Description of Artificial Sequence: Synthetic oligonucleotide
guagauuucucaagaacucu

SEQ ID NO: 19 - RNA, 20 nt, Artificial Sequence
  Description of Artificial Sequence: Synthetic oligonucleotide
acauguuagcaguuucucgu

SEQ ID NO: 20 - RNA, 20 nt, Artificial Sequence
  Description of Artificial Sequence: Synthetic oligonucleotide
gacuucaccacaggauccug

SEQ ID NO: 21 - RNA, 20 nt, Artificial Sequence
  Description of Artificial Sequence: Synthetic oligonucleotide
aaucagucccuagaggguuc

SEQ ID NO: 22 - RNA, 20 nt, Artificial Sequence
  Description of Artificial Sequence: Synthetic oligonucleotide
ucagagaaucagucccuaga

SEQ ID NO: 23 - RNA, 20 nt, Artificial Sequence
  Description of Artificial Sequence: Synthetic oligonucleotide
uucagagaaucagucccuag

SEQ ID NO: 24 - RNA, 20 nt, Artificial Sequence
  Description of Artificial Sequence: Synthetic oligonucleotide
ucuagggacugauucucuga

SEQ ID NO: 25 - RNA, 20 nt, Artificial Sequence
  Description of Artificial Sequence: Synthetic oligonucleotide
cuagggacugauucucugaa

SEQ ID NO: 26 - RNA, 20 nt, Artificial Sequence
  Description of Artificial Sequence: Synthetic oligonucleotide
cacgacacuuucaguaaugc

SEQ ID NO: 27 - RNA, 20 nt, Artificial Sequence
  Description of Artificial Sequence: Synthetic oligonucleotide
acgacacuuucaguaaugca

SEQ ID NO: 28 - RNA, 20 nt, Artificial Sequence
  Description of Artificial Sequence: Synthetic oligonucleotide
agucaaacuggagcaaaccu

SEQ ID NO: 29 - RNA, 20 nt, Artificial Sequence
  Description of Artificial Sequence: Synthetic oligonucleotide
ccugcccugaaagguggccg

SEQ ID NO: 30 - RNA, 20 nt, Artificial Sequence
  Description of Artificial Sequence: Synthetic oligonucleotide
cccggacagccugcccugaa

SEQ ID NO: 31 - RNA, 20 nt, Artificial Sequence
  Description of Artificial Sequence: Synthetic oligonucleotide
ccucggccaccuuucagggc

SEQ ID NO: 32 - RNA, 20 nt, Artificial Sequence
  Description of Artificial Sequence: Synthetic oligonucleotide
accuuucagggcaggcuguc

SEQ ID NO: 33 - RNA, 20 nt, Artificial Sequence
  Description of Artificial Sequence: Synthetic oligonucleotide
ccuuucagggcaggcugucc

SEQ ID NO: 34 - RNA, 20 nt, Artificial Sequence
  Description of Artificial Sequence: Synthetic oligonucleotide
agugugacaucucaguuacc

SEQ ID NO: 35 - RNA, 20 nt, Artificial Sequence
  Description of Artificial Sequence: Synthetic oligonucleotide
gauuguugggaguugcuuga

SEQ ID NO: 36 - RNA, 20 nt, Artificial Sequence
  Description of Artificial Sequence: Synthetic oligonucleotide
ucuuaagggggcagauuguu

SEQ ID NO: 37 - RNA, 20 nt, Artificial Sequence
  Description of Artificial Sequence: Synthetic oligonucleotide
aucuuaagggggcagauugu

SEQ ID NO: 38 - RNA, 20 nt, Artificial Sequence
  Description of Artificial Sequence: Synthetic oligonucleotide
gaagguuuuaggaucuuaag

SEQ ID NO: 39 - RNA, 20 nt, Artificial Sequence
  Description of Artificial Sequence: Synthetic oligonucleotide
ggaagguuuuaggaucuuaa

SEQ ID NO: 40 - RNA, 20 nt, Artificial Sequence
  Description of Artificial Sequence: Synthetic oligonucleotide
gggaagguuuuaggaucuua

SEQ ID NO: 41 - RNA, 20 nt, Artificial Sequence
  Description of Artificial Sequence: Synthetic oligonucleotide
aauggcagagggaagguuuu

SEQ ID NO: 42 - RNA, 20 nt, Artificial Sequence
  Description of Artificial Sequence: Synthetic oligonucleotide
caaucacaacuguggaguaa

SEQ ID NO: 43 - RNA, 20 nt, Artificial Sequence
  Description of Artificial Sequence: Synthetic oligonucleotide
cauuacuccacaguugugau

SEQ ID NO: 44 - RNA, 20 nt, Artificial Sequence
  Description of Artificial Sequence: Synthetic oligonucleotide
uugcuguuuuccucaacaag

SEQ ID NO: 45 - RNA, 20 nt, Artificial Sequence
  Description of Artificial Sequence: Synthetic oligonucleotide
uuuuugcacgcucgugaucg

SEQ ID NO: 46 - RNA, 20 nt, Artificial Sequence
  Description of Artificial Sequence: Synthetic oligonucleotide
cuuuaagguggaacaggccc

SEQ ID NO: 47 - RNA, 20 nt, Artificial Sequence
  Description of Artificial Sequence: Synthetic oligonucleotide
uaggcccuuuaagguggaac

SEQ ID NO: 48 - RNA, 20 nt, Artificial Sequence
  Description of Artificial Sequence: Synthetic oligonucleotide
caugccuaggcccuuuaagg

SEQ ID NO: 49 - RNA, 20 nt, Artificial Sequence
  Description of Artificial Sequence: Synthetic oligonucleotide
cugggccuguuccaccuuaa

SEQ ID NO: 50 - RNA, 20 nt, Artificial Sequence
  Description of Artificial Sequence: Synthetic oligonucleotide
ugggccuguuccaccuuaaa

SEQ ID NO: 51 - RNA, 20 nt, Artificial Sequence
  Description of Artificial Sequence: Synthetic oligonucleotide
aggcaugccuaggcccuuua

SEQ ID NO: 52 - RNA, 20 nt, Artificial Sequence
  Description of Artificial Sequence: Synthetic oligonucleotide
uguuccaccuuaaagggccu

SEQ ID NO: 53 - RNA, 20 nt, Artificial Sequence
  Description of Artificial Sequence: Synthetic oligonucleotide
uaggcacgcuccaaauaugg

SEQ ID NO: 54 - RNA, 20 nt, Artificial Sequence
  Description of Artificial Sequence: Synthetic oligonucleotide
aaguaggcacgcuccaaaua

SEQ ID NO: 55 - RNA, 20 nt, Artificial Sequence
  Description of Artificial Sequence: Synthetic oligonucleotide
uauuuggagcgugccuacuu

SEQ ID NO: 56 - RNA, 20 nt, Artificial Sequence
  Description of Artificial Sequence: Synthetic oligonucleotide
auuuggagcgugccuacuuu

SEQ ID NO: 57 - RNA, 20 nt, Artificial Sequence
  Description of Artificial Sequence: Synthetic oligonucleotide
ggagguucccgccccaaagu

SEQ ID NO: 58 - RNA, 20 nt, Artificial Sequence
  Description of Artificial Sequence: Synthetic oligonucleotide
uuuggagcgugccuacuuug

SEQ ID NO: 59 - RNA, 20 nt, Artificial Sequence
  Description of Artificial Sequence: Synthetic oligonucleotide
ggagcgugccuacuuugggg

SEQ ID NO: 60 - RNA, 20 nt, Artificial Sequence
  Description of Artificial Sequence: Synthetic oligonucleotide
gagcgugccuacuuuggggc

SEQ ID NO: 61 - RNA, 20 nt, Artificial Sequence
  Description of Artificial Sequence: Synthetic oligonucleotide
cuuuggggcgggaaccuccu

SEQ ID NO: 62 - RNA, 20 nt, Artificial Sequence
  Description of Artificial Sequence: Synthetic oligonucleotide
uuuggggcgggaaccuccuu

SEQ ID NO: 63 - RNA, 20 nt, Artificial Sequence
  Description of Artificial Sequence: Synthetic oligonucleotide
cgcugaccuaaucacuccca

SEQ ID NO: 64 - RNA, 20 nt, Artificial Sequence
  Description of Artificial Sequence: Synthetic oligonucleotide
gggagugauuaggucagcgc

SEQ ID NO: 65 - RNA, 20 nt, Artificial Sequence
  Description of Artificial Sequence: Synthetic oligonucleotide
ggagugauuaggucagcgcu

SEQ ID NO: 66 - RNA, 20 nt, Artificial Sequence
  Description of Artificial Sequence: Synthetic oligonucleotide
cgggugccagaaaccaaaca

SEQ ID NO: 67 - RNA, 20 nt, Artificial Sequence
  Description of Artificial Sequence: Synthetic oligonucleotide
aggugaccuuguuugguuuc

SEQ ID NO: 68 - RNA, 20 nt, Artificial Sequence
  Description of Artificial Sequence: Synthetic oligonucleotide
aaacagugcaccacuguucu

SEQ ID NO: 69 - RNA, 20 nt, Artificial Sequence
  Description of Artificial Sequence: Synthetic oligonucleotide
uuucuggcacccgagaacag

SEQ ID NO: 70 - RNA, 20 nt, Artificial Sequence
  Description of Artificial Sequence: Synthetic oligonucleotide
aauuagacaaacgagggcag

SEQ ID NO: 71 - RNA, 20 nt, Artificial Sequence
  Description of Artificial Sequence: Synthetic oligonucleotide
ugggccaauuagacaaacga

SEQ ID NO: 72 - RNA, 20 nt, Artificial Sequence
  Description of Artificial Sequence: Synthetic oligonucleotide
cugggccaauuagacaaacg

SEQ ID NO: 73 - RNA, 20 nt, Artificial Sequence
  Description of Artificial Sequence: Synthetic oligonucleotide
uucgcgcugguggagcgucu

SEQ ID NO: 74 - RNA, 20 nt, Artificial Sequence
  Description of Artificial Sequence: Synthetic oligonucleotide
cuucgcgcugguggagcguc

SEQ ID NO: 75 - RNA, 20 nt, Artificial Sequence
  Description of Artificial Sequence: Synthetic oligonucleotide
cccgggaagcuucgcgcugg

SEQ ID NO: 76 - RNA, 20 nt, Artificial Sequence
  Description of Artificial Sequence: Synthetic oligonucleotide
gcucccgggaagcuucgcgc

SEQ ID NO: 77 - RNA, 20 nt, Artificial Sequence
  Description of Artificial Sequence: Synthetic oligonucleotide
uccaccagcgcgaagcuucc

SEQ ID NO: 78 - RNA, 20 nt, Artificial Sequence
  Description of Artificial Sequence: Synthetic oligonucleotide
ccaccagcgcgaagcuuccc

SEQ ID NO: 79 - RNA, 20 nt, Artificial Sequence
  Description of Artificial Sequence: Synthetic oligonucleotide
gcuucccgggagcuccucgc

SEQ ID NO: 80 - RNA, 20 nt, Artificial Sequence
  Description of Artificial Sequence: Synthetic oligonucleotide
gccuccagccccgguuccca

SEQ ID NO: 81 - RNA, 20 nt, Artificial Sequence
  Description of Artificial Sequence: Synthetic oligonucleotide
cgcgccugcgccgugggaac

SEQ ID NO: 82 - RNA, 20 nt, Artificial Sequence
  Description of Artificial Sequence: Synthetic oligonucleotide
gcgccugcgccgugggaacc

SEQ ID NO: 83 - RNA, 20 nt, Artificial Sequence
  Description of Artificial Sequence: Synthetic oligonucleotide
cgccugcgccgugggaaccg

SEQ ID NO: 84 - RNA, 20 nt, Artificial Sequence
  Description of Artificial Sequence: Synthetic oligonucleotide
uguacgcuacucggcuccag

SEQ ID NO: 85 - RNA, 20 nt, Artificial Sequence
  Description of Artificial Sequence: Synthetic oligonucleotide
acgccgcucuguacgcuacu

SEQ ID NO: 86 - RNA, 20 nt, Artificial Sequence
  Description of Artificial Sequence: Synthetic oligonucleotide
gagccgaguagcguacagag

SEQ ID NO: 87 - RNA, 20 nt, Artificial Sequence
  Description of Artificial Sequence: Synthetic oligonucleotide
uacagagcggcgugugacgc

SEQ ID NO: 88 - RNA, 20 nt, Artificial Sequence
  Description of Artificial Sequence: Synthetic oligonucleotide
acagagcggcgugugacgcg

SEQ ID NO: 89 - RNA, 20 nt, Artificial Sequence
  Description of Artificial Sequence: Synthetic oligonucleotide
cgucaaaccggggcgacguu

SEQ ID NO: 90 - RNA, 20 nt, Artificial Sequence
  Description of Artificial Sequence: Synthetic oligonucleotide
gcgucaaaccggggcgacgu

SEQ ID NO: 91 - RNA, 20 nt, Artificial Sequence
  Description of Artificial Sequence: Synthetic oligonucleotide
gcgugcucccaacgucgccc

SEQ ID NO: 92 - RNA, 20 nt, Artificial Sequence
  Description of Artificial Sequence: Synthetic oligonucleotide
gugccgugugcgucaaaccg

SEQ ID NO: 93 - RNA, 20 nt, Artificial Sequence
  Description of Artificial Sequence: Synthetic oligonucleotide
ggugccgugugcgucaaacc

SEQ ID NO: 94 - RNA, 20 nt, Artificial Sequence
  Description of Artificial Sequence: Synthetic oligonucleotide
uggugccgugugcgucaaac

SEQ ID NO: 95 - RNA, 20 nt, Artificial Sequence
  Description of Artificial Sequence: Synthetic oligonucleotide
ucgccccgguuugacgcaca

SEQ ID NO: 96 - RNA, 20 nt, Artificial Sequence
  Description of Artificial Sequence: Synthetic oligonucleotide
aaccccugaaacucacaguu

SEQ ID NO: 97 - RNA, 20 nt, Artificial Sequence
  Description of Artificial Sequence: Synthetic oligonucleotide
ggcaccaaacugugaguuuc

SEQ ID NO: 98 - RNA, 20 nt, Artificial Sequence
  Description of Artificial Sequence: Synthetic oligonucleotide
gguuauuuggucagauucgc

SEQ ID NO: 99 - RNA, 20 nt, Artificial Sequence
  Description of Artificial Sequence: Synthetic oligonucleotide
guuauuuggucagauucgcu

SEQ ID NO: 100 - RNA, 20 nt, Artificial Sequence
  Description of Artificial Sequence: Synthetic oligonucleotide
agauucgcugggacccgagu

SEQ ID NO: 101 - RNA, 20 nt, Artificial Sequence
  Description of Artificial Sequence: Synthetic oligonucleotide
ccagaggcccgaaacccacu

SEQ ID NO: 102 - RNA, 20 nt, Artificial Sequence
  Description of Artificial Sequence: Synthetic oligonucleotide
cugggacccgaguggguuuc

SEQ ID NO: 103 - RNA, 20 nt, Artificial Sequence
  Description of Artificial Sequence: Synthetic oligonucleotide
ccgaguggguuucgggccuc

SEQ ID NO: 104 - RNA, 20 nt, Artificial Sequence
  Description of Artificial Sequence: Synthetic oligonucleotide
cgaguggguuucgggccucu

SEQ ID NO: 105 - RNA, 20 nt, Artificial Sequence
  Description of Artificial Sequence: Synthetic oligonucleotide
gguuucgggccucugggcug

SEQ ID NO: 106 - RNA, 20 nt, Artificial Sequence
  Description of Artificial Sequence: Synthetic oligonucleotide
ugaggguggcggaagaacuu

SEQ ID NO: 107 - RNA, 20 nt, Artificial Sequence
  Description of Artificial Sequence: Synthetic oligonucleotide
gaggguggcggaagaacuug

SEQ ID NO: 108 - RNA, 20 nt, Artificial Sequence
  Description of Artificial Sequence: Synthetic oligonucleotide
aacuugggggacccggccuc

SEQ ID NO: 109 - RNA, 20 nt, Artificial Sequence
  Description of Artificial Sequence: Synthetic oligonucleotide
agcuccccgggcccgagagc

SEQ ID NO: 110 - RNA, 20 nt, Artificial Sequence
  Description of Artificial Sequence: Synthetic oligonucleotide
cggggagcuacgcccuaggc

SEQ ID NO: 111 - RNA, 20 nt, Artificial Sequence
  Description of Artificial Sequence: Synthetic oligonucleotide
ggggagcuacgcccuaggcu

SEQ ID NO: 112 - RNA, 20 nt, Artificial Sequence
  Description of Artificial Sequence: Synthetic oligonucleotide
augcguccuuuuggauggcu

SEQ ID NO: 113 - RNA, 20 nt, Artificial Sequence
  Description of Artificial Sequence: Synthetic oligonucleotide
aaugcguccuuuuggauggc

SEQ ID NO: 114 - RNA, 20 nt, Artificial Sequence
  Description of Artificial Sequence: Synthetic oligonucleotide
gcaaaaugcguccuuuugga

SEQ ID NO: 115 - RNA, 20 nt, Artificial Sequence
  Description of Artificial Sequence: Synthetic oligonucleotide
ugcggcaaaaugcguccuuu

SEQ ID NO: 116 - RNA, 20 nt, Artificial Sequence
  Description of Artificial Sequence: Synthetic oligonucleotide
aaggacgcauuuugccgcac

SEQ ID NO: 117 - RNA, 20 nt, Artificial Sequence
  Description of Artificial Sequence: Synthetic oligonucleotide
uuuugccgcacaggcuaaga

SEQ ID NO: 118 - RNA, 20 nt, Artificial Sequence
  Description of Artificial Sequence: Synthetic oligonucleotide
cgcacaggcuaagauggcgg

SEQ ID NO: 119 - RNA, 20 nt, Artificial Sequence
  Description of Artificial Sequence: Synthetic oligonucleotide
ggcggaguuggugcuacaca

SEQ ID NO: 120 - RNA, 20 nt, Artificial Sequence
  Description of Artificial Sequence: Synthetic oligonucleotide
uacacaaggagcccgggccc

SEQ ID NO: 121 - RNA, 20 nt, Artificial Sequence
  Description of Artificial Sequence: Synthetic oligonucleotide
gccuccccgaacccggggcc

SEQ ID NO: 122 - RNA, 20 nt, Artificial Sequence
  Description of Artificial Sequence: Synthetic oligonucleotide
aggagcccgggccccggguu

SEQ ID NO: 123 - RNA, 20 nt, Artificial Sequence
  Description of Artificial Sequence: Synthetic oligonucleotide
gagcccgggccccggguucg

SEQ ID NO: 124 - RNA, 20 nt, Artificial Sequence
  Description of Artificial Sequence: Synthetic oligonucleotide
guggcccccagcgaccgccg

SEQ ID NO: 125 - RNA, 20 nt, Artificial Sequence
  Description of Artificial Sequence: Synthetic oligonucleotide
gcggcggucgcugggggcca

SEQ ID NO: 126 - RNA, 20 nt, Artificial Sequence
  Description of Artificial Sequence: Synthetic oligonucleotide
gccgcucaccucaggcuccg

SEQ ID NO: 127 - RNA, 20 nt, Artificial Sequence
  Description of Artificial Sequence: Synthetic oligonucleotide
cggcggccgccgcucaccuc

SEQ ID NO: 128 - RNA, 20 nt, Artificial Sequence
  Description of Artificial Sequence: Synthetic oligonucleotide
acggagccugaggugagcgg

SEQ ID NO: 129 - RNA, 20 nt, Artificial Sequence
  Description of Artificial Sequence: Synthetic oligonucleotide
acucggcggggggauggggg

SEQ ID NO: 130 - RNA, 20 nt, Artificial Sequence
  Description of Artificial Sequence: Synthetic oligonucleotide
cggauccuccgacgccgcag

SEQ ID NO: 131 - RNA, 20 nt, Artificial Sequence
  Description of Artificial Sequence: Synthetic oligonucleotide
ggggcuuuccgcugcggcgu

SEQ ID NO: 132 - RNA, 20 nt, Artificial Sequence
  Description of Artificial Sequence: Synthetic oligonucleotide
gcuuuccgcugcggcgucgg

SEQ ID NO: 133 - RNA, 20 nt, Artificial Sequence
  Description of Artificial Sequence: Synthetic oligonucleotide
ggcgucggaggauccgguag

SEQ ID NO: 134 - RNA, 20 nt, Artificial Sequence
  Description of Artificial Sequence: Synthetic oligonucleotide
agccccuuuguguccgcuac

SEQ ID NO: 135 - RNA, 20 nt, Artificial Sequence
  Description of Artificial Sequence: Synthetic oligonucleotide
ggauccgguagcggacacaa

SEQ ID NO: 136 - RNA, 20 nt, Artificial Sequence
  Description of Artificial Sequence: Synthetic oligonucleotide
gauccgguagcggacacaaa

SEQ ID NO: 137 - RNA, 20 nt, Artificial Sequence
  Description of Artificial Sequence: Synthetic oligonucleotide
auccgguagcggacacaaag

SEQ ID NO: 138 - RNA, 20 nt, Artificial Sequence
  Description of Artificial Sequence: Synthetic oligonucleotide
cggacacaaaggggcugagc

SEQ ID NO: 139 - RNA, 20 nt, Artificial Sequence
  Description of Artificial Sequence: Synthetic oligonucleotide
cugagcugggcacuagacuu

SEQ ID NO: 140 - RNA, 20 nt, Artificial Sequence
  Description of Artificial Sequence: Synthetic oligonucleotide
ugagcugggcacuagacuug

SEQ ID NO: 141 - RNA, 20 nt, Artificial Sequence
  Description of Artificial Sequence: Synthetic oligonucleotide
gagcugggcacuagacuugg

SEQ ID NO: 142 - RNA, 20 nt, Artificial Sequence
  Description of Artificial Sequence: Synthetic oligonucleotide
cgagcagccagugagcagua

SEQ ID NO: 143 - RNA, 20 nt, Artificial Sequence
  Description of Artificial Sequence: Synthetic oligonucleotide
cuccccaagccgccugaucu

SEQ ID NO: 144 - RNA, 20 nt, Artificial Sequence
  Description of Artificial Sequence: Synthetic oligonucleotide
ggggccgagaucaggcggcu

SEQ ID NO: 145 - RNA, 20 nt, Artificial Sequence
  Description of Artificial Sequence: Synthetic oligonucleotide
gggccgagaucaggcggcuu

SEQ ID NO: 146 - RNA, 20 nt, Artificial Sequence
  Description of Artificial Sequence: Synthetic oligonucleotide
ggccgagaucaggcggcuug

SEQ ID NO: 147 - RNA, 20 nt, Artificial Sequence
  Description of Artificial Sequence: Synthetic oligonucleotide
gcauugcaauggcgaccgcc

SEQ ID NO: 148 - RNA, 20 nt, Artificial Sequence
  Description of Artificial Sequence: Synthetic oligonucleotide
cguuacucagugcauugcaa

SEQ ID NO: 149 - RNA, 20 nt, Artificial Sequence
  Description of Artificial Sequence: Synthetic oligonucleotide
uugcaaugcacugaguaacg

SEQ ID NO: 150 - RNA, 20 nt, Artificial Sequence
  Description of Artificial Sequence: Synthetic oligonucleotide
caaugcacugaguaacgggg

SEQ ID NO: 151 - RNA, 20 nt, Artificial Sequence
  Description of Artificial Sequence: Synthetic oligonucleotide
aaugcacugaguaacggggc

SEQ ID NO: 152 - RNA, 20 nt, Artificial Sequence
  Description of Artificial Sequence: Synthetic oligonucleotide
gcagccucaacgagaggggu

SEQ ID NO: 153 - RNA, 20 nt, Artificial Sequence
  Description of Artificial Sequence: Synthetic oligonucleotide
ccgagcagccucaacgagag

SEQ ID NO: 154 - RNA, 20 nt, Artificial Sequence
  Description of Artificial Sequence: Synthetic oligonucleotide
accgagcagccucaacgaga

SEQ ID NO: 155 - RNA, 20 nt, Artificial Sequence
  Description of Artificial Sequence: Synthetic oligonucleotide
aaccgagcagccucaacgag

SEQ ID NO: 156 - RNA, 20 nt, Artificial Sequence
  Description of Artificial Sequence: Synthetic oligonucleotide
gucaccaaccccucucguug

SEQ ID NO: 157 - RNA, 20 nt, Artificial Sequence
  Description of Artificial Sequence: Synthetic oligonucleotide
ccccucucguugaggcugcu

SEQ ID NO: 158 - RNA, 20 nt, Artificial Sequence
  Description of Artificial Sequence: Synthetic oligonucleotide
ucguugaggcugcucgguug

SEQ ID NO: 159 - RNA, 20 nt, Artificial Sequence
  Description of Artificial Sequence: Synthetic oligonucleotide
ucgguuguggccagaaacgc

SEQ ID NO: 160 - RNA, 20 nt, Artificial Sequence
  Description of Artificial Sequence: Synthetic oligonucleotide
cuacaccccuccccuuacuu

SEQ ID NO: 161 - RNA, 20 nt, Artificial Sequence
  Description of Artificial Sequence: Synthetic oligonucleotide
ugcgguccugucccaaguaa

SEQ ID NO: 162 - RNA, 20 nt, Artificial Sequence
  Description of Artificial Sequence: Synthetic oligonucleotide
augcgguccugucccaagua

SEQ ID NO: 163 - RNA, 20 nt, Artificial Sequence
  Description of Artificial Sequence: Synthetic oligonucleotide
aucuugcaggacggggggag

SEQ ID NO: 164 - RNA, 20 nt, Artificial Sequence
  Description of Artificial Sequence: Synthetic oligonucleotide
gaucuugcaggacgggggga

SEQ ID NO: 165 - RNA, 20 nt, Artificial Sequence
  Description of Artificial Sequence: Synthetic oligonucleotide
auaagaucuugcaggacggg

SEQ ID NO: 166 - RNA, 20 nt, Artificial Sequence
  Description of Artificial Sequence: Synthetic oligonucleotide
cauaagaucuugcaggacgg

SEQ ID NO: 167 - RNA, 20 nt, Artificial Sequence
  Description of Artificial Sequence: Synthetic oligonucleotide
gcauaagaucuugcaggacg

SEQ ID NO: 168 - RNA, 20 nt, Artificial Sequence
  Description of Artificial Sequence: Synthetic oligonucleotide
cgcauaagaucuugcaggac

SEQ ID NO: 169 - RNA, 20 nt, Artificial Sequence
  Description of Artificial Sequence: Synthetic oligonucleotide
ccgcauaagaucuugcagga

SEQ ID NO: 170 - RNA, 20 nt, Artificial Sequence
  Description of Artificial Sequence: Synthetic oligonucleotide
cuagccgcauaagaucuugc

SEQ ID NO: 171 - RNA, 20 nt, Artificial Sequence
  Description of Artificial Sequence: Synthetic oligonucleotide
ccguccugcaagaucuuaug

SEQ ID NO: 172 - RNA, 20 nt, Artificial Sequence
  Description of Artificial Sequence: Synthetic oligonucleotide
cugcaagaucuuaugcggcu

SEQ ID NO: 173 - RNA, 20 nt, Artificial Sequence
  Description of Artificial Sequence: Synthetic oligonucleotide
aucuuaugcggcuaggugcc

SEQ ID NO: 174 - RNA, 20 nt, Artificial Sequence
  Description of Artificial Sequence: Synthetic oligonucleotide
ucuuaugcggcuaggugccu

SEQ ID NO: 175 - RNA, 20 nt, Artificial Sequence
  Description of Artificial Sequence: Synthetic oligonucleotide
accucuugcuguuacuuccc

SEQ ID NO: 176 - RNA, 20 nt, Artificial Sequence
  Description of Artificial Sequence: Synthetic oligonucleotide
gguaaaucgcucgaaguguu

SEQ ID NO: 177 - RNA, 20 nt, Artificial Sequence
  Description of Artificial Sequence: Synthetic oligonucleotide
guaaaucgcucgaaguguuu

SEQ ID NO: 178 - RNA, 20 nt, Artificial Sequence
  Description of Artificial Sequence: Synthetic oligonucleotide
cucgaaguguuuggguugcc

SEQ ID NO: 179 - RNA, 20 nt, Artificial Sequence
  Description of Artificial Sequence: Synthetic oligonucleotide
ucgaaguguuuggguugcca

SEQ ID NO: 180 - RNA, 20 nt, Artificial Sequence
  Description of Artificial Sequence: Synthetic oligonucleotide
cgaaguguuuggguugccag

SEQ ID NO: 181 - RNA, 20 nt, Artificial Sequence
  Description of Artificial Sequence: Synthetic oligonucleotide
gagaggcaaaaagcuuuagc

SEQ ID NO: 182 - RNA, 20 nt, Artificial Sequence
  Description of Artificial Sequence: Synthetic oligonucleotide
guaacuucccagggacacaa

SEQ ID NO: 183 - RNA, 20 nt, Artificial Sequence
  Description of Artificial Sequence: Synthetic oligonucleotide
ucuggcagaguaacuuccca

SEQ ID NO: 184 - RNA, 20 nt, Artificial Sequence
  Description of Artificial Sequence: Synthetic oligonucleotide
cucuggcagaguaacuuccc

SEQ ID NO: 185 - RNA, 20 nt, Artificial Sequence
  Description of Artificial Sequence: Synthetic oligonucleotide
cuucagguucacgggagaag

SEQ ID NO: 186 - RNA, 20 nt, Artificial Sequence
  Description of Artificial Sequence: Synthetic oligonucleotide
acaacucaucuucagguuca

SEQ ID NO: 187 - RNA, 20 nt, Artificial Sequence
  Description of Artificial Sequence: Synthetic oligonucleotide
gucugggacaacucaucuuc

SEQ ID NO: 188 - RNA, 20 nt, Artificial Sequence
  Description of Artificial Sequence: Synthetic oligonucleotide
ccaaucacugagaagagucu

SEQ ID NO: 189 - RNA, 20 nt, Artificial Sequence
  Description of Artificial Sequence: Synthetic oligonucleotide
uccaaucacugagaagaguc

SEQ ID NO: 190 - RNA, 20 nt, Artificial Sequence
  Description of Artificial Sequence: Synthetic oligonucleotide
cccagacucuucucagugau

SEQ ID NO: 191 - RNA, 20 nt, Artificial Sequence
  Description of Artificial Sequence: Synthetic oligonucleotide
aacuuaggugguggagcuaa

SEQ ID NO: 192 - RNA, 20 nt, Artificial Sequence
  Description of Artificial Sequence: Synthetic oligonucleotide
cucuuguugggauccaucua

SEQ ID NO: 193 - RNA, 20 nt, Artificial Sequence
  Description of Artificial Sequence: Synthetic oligonucleotide
uaauguugcuaaaccauaga

SEQ ID NO: 194 - RNA, 20 nt, Artificial Sequence
  Description of Artificial Sequence: Synthetic oligonucleotide
cuaugguuuagcaacauuag

SEQ ID NO: 195 - RNA, 20 nt, Artificial Sequence
  Description of Artificial Sequence: Synthetic oligonucleotide
ugugaucaucaaacucaacg

SEQ ID NO: 196 - RNA, 20 nt, Artificial Sequence
  Description of Artificial Sequence: Synthetic oligonucleotide
gugaucaucaaacucaacga

SEQ ID NO: 197 - RNA, 20 nt, Artificial Sequence
  Description of Artificial Sequence: Synthetic oligonucleotide
aacgaggggauaaacauaau

SEQ ID NO: 198 - RNA, 20 nt, Artificial Sequence
  Description of Artificial Sequence: Synthetic oligonucleotide
acgaggggauaaacauaauu

SEQ ID NO: 199 - RNA, 20 nt, Artificial Sequence
  Description of Artificial Sequence: Synthetic oligonucleotide
cgaggggauaaacauaauug

SEQ ID NO: 200 - RNA, 20 nt, Artificial Sequence
  Description of Artificial Sequence: Synthetic oligonucleotide
gaggggauaaacauaauugg

SEQ ID NO: 201 - RNA, 20 nt, Artificial Sequence
  Description of Artificial Sequence: Synthetic oligonucleotide
acauaauugggggcgaauga

SEQ ID NO: 202 - RNA, 20 nt, Artificial Sequence
  Description of Artificial Sequence: Synthetic oligonucleotide
ggacuggacaggauagucgg

SEQ ID NO: 203 - RNA, 20 nt, Artificial Sequence
  Description of Artificial Sequence: Synthetic oligonucleotide
gcguggaauuaggacuggac

SEQ ID NO: 204 - RNA, 20 nt, Artificial Sequence
  Description of Artificial Sequence: Synthetic oligonucleotide
aacaagcguggaauuaggac

SEQ ID NO: 205 - RNA, 20 nt, Artificial Sequence
  Description of Artificial Sequence: Synthetic oligonucleotide
gaugcaacaagcguggaauu

SEQ ID NO: 206 - RNA, 20 nt, Artificial Sequence
  Description of Artificial Sequence: Synthetic oligonucleotide
ccauccagaugcaacaagcg

SEQ ID NO: 207 - RNA, 20 nt, Artificial Sequence
  Description of Artificial Sequence: Synthetic oligonucleotide
aauuccacgcuuguugcauc

SEQ ID NO: 208 - RNA, 20 nt, Artificial Sequence
  Description of Artificial Sequence: Synthetic oligonucleotide
ccacgcuuguugcaucugga

SEQ ID NO: 209 - RNA, 20 nt, Artificial Sequence
  Description of Artificial Sequence: Synthetic oligonucleotide
uaaagcaaacuacugcaggg

SEQ ID NO: 210 - RNA, 20 nt, Artificial Sequence
  Description of Artificial Sequence: Synthetic oligonucleotide
caacuaaagcaaacuacugc

SEQ ID NO: 211 - RNA, 20 nt, Artificial Sequence
  Description of Artificial Sequence: Synthetic oligonucleotide
cauuuuuuggucccaugaga

SEQ ID NO: 212 - RNA, 20 nt, Artificial Sequence
  Description of Artificial Sequence: Synthetic oligonucleotide
aguugcauguguaaguaucu

SEQ ID NO: 213 - RNA, 20 nt, Artificial Sequence
  Description of Artificial Sequence: Synthetic oligonucleotide
uaaguaucuagggaacuuga

SEQ ID NO: 214 - RNA, 20 nt, Artificial Sequence
  Description of Artificial Sequence: Synthetic oligonucleotide
caguaauauugcauuuuggu

SEQ ID NO: 215 - RNA, 20 nt, Artificial Sequence
  Description of Artificial Sequence: Synthetic oligonucleotide
aaaaccucguuuuuauaaua

SEQ ID NO: 216 - RNA, 20 nt, Artificial Sequence
  Description of Artificial Sequence: Synthetic oligonucleotide
ucuagcuuagacauuuuaau

SEQ ID NO: 217 - RNA, 20 nt, Artificial Sequence
  Description of Artificial Sequence: Synthetic oligonucleotide
cuugauuaguauuaaugcag

SEQ ID NO: 218 - RNA, 20 nt, Artificial Sequence
  Description of Artificial Sequence: Synthetic oligonucleotide
aaacaccuaauguuuugugu

SEQ ID NO: 219 - RNA, 20 nt, Artificial Sequence
  Description of Artificial Sequence: Synthetic oligonucleotide
uggcaauuaacagaauuccu

SEQ ID NO: 220 - RNA, 20 nt, Artificial Sequence
  Description of Artificial Sequence: Synthetic oligonucleotide
acagucuuguauuaaugaau

SEQ ID NO: 221 - RNA, 20 nt, Artificial Sequence
  Description of Artificial Sequence: Synthetic oligonucleotide
acuguaaaacuuuaugaucc

SEQ ID NO: 222 - RNA, 20 nt, Artificial Sequence
  Description of Artificial Sequence: Synthetic oligonucleotide
caauauauuguaaaagagga

SEQ ID NO: 223 - RNA, 20 nt, Artificial Sequence
  Description of Artificial Sequence: Synthetic oligonucleotide
accagagaugauuaaguuag

SEQ ID NO: 224 - RNA, 20 nt, Artificial Sequence
  Description of Artificial Sequence: Synthetic oligonucleotide
ugauuaaguuaguggcauaa

SEQ ID NO: 225 - RNA, 20 nt, Artificial Sequence
  Description of Artificial Sequence: Synthetic oligonucleotide
auacaaacagcaauggguag

SEQ ID NO: 226 - RNA, 20 nt, Artificial Sequence
  Description of Artificial Sequence: Synthetic oligonucleotide
ugacaaauacaaacagcaau

SEQ ID NO: 227 - RNA, 20 nt, Artificial Sequence
  Description of Artificial Sequence: Synthetic oligonucleotide
guuuguauuugucauauugc

SEQ ID NO: 228 - RNA, 20 nt, Artificial Sequence
  Description of Artificial Sequence: Synthetic oligonucleotide
uaaguuaaaaacuuucauau

SEQ ID NO: 229 - RNA, 20 nt, Artificial Sequence
  Description of Artificial Sequence: Synthetic oligonucleotide
uucugggucaagacugcauu

SEQ ID NO: 230 - RNA, 20 nt, Artificial Sequence
  Description of Artificial Sequence: Synthetic oligonucleotide
guuauugccaguuauuaugu

SEQ ID NO: 231 - RNA, 20 nt, Artificial Sequence
  Description of Artificial Sequence: Synthetic oligonucleotide
agacuacuacuucuacugag

SEQ ID NO: 232 - RNA, 20 nt, Artificial Sequence
  Description of Artificial Sequence: Synthetic oligonucleotide
ucuacugagugguaccucua

SEQ ID NO: 233 - RNA, 20 nt, Artificial Sequence
  Description of Artificial Sequence: Synthetic oligonucleotide
ugguaccucuaaggucuguu

SEQ ID NO: 234 - RNA, 20 nt, Artificial Sequence
  Description of Artificial Sequence: Synthetic oligonucleotide
caaguagugacagucauuua

SEQ ID NO: 235 - RNA, 20 nt, Artificial Sequence
  Description of Artificial Sequence: Synthetic oligonucleotide
guagugacagucauuuaugg

SEQ ID NO: 236 - RNA, 20 nt, Artificial Sequence
  Description of Artificial Sequence: Synthetic oligonucleotide
ugaaaauuagagucacuuuc

SEQ ID NO: 237 - RNA, 20 nt, Artificial Sequence
  Description of Artificial Sequence: Synthetic oligonucleotide
ggaaaauguuuaagguuggc

SEQ ID NO: 238 - RNA, 20 nt, Artificial Sequence
  Description of Artificial Sequence: Synthetic oligonucleotide
aacuggaaaauguuuaaggu

SEQ ID NO: 239 - RNA, 20 nt, Artificial Sequence
  Description of Artificial Sequence: Synthetic oligonucleotide
cuugaaugacaaacuaaaac

SEQ ID NO: 240 - RNA, 20 nt, Artificial Sequence
  Description of Artificial Sequence: Synthetic oligonucleotide
ugagacuguuaauggguagc

SEQ ID NO: 241 - RNA, 20 nt, Artificial Sequence
  Description of Artificial Sequence: Synthetic oligonucleotide
uucaaagagaauagaagugg

SEQ ID NO: 242 - RNA, 20 nt, Artificial Sequence
  Description of Artificial Sequence: Synthetic oligonucleotide
ggaaaagugaaucuuauucu

SEQ ID NO: 243 - RNA, 20 nt, Artificial Sequence
  Description of Artificial Sequence: Synthetic oligonucleotide
caauuguagcuugcagcaaa

SEQ ID NO: 244 - RNA, 20 nt, Artificial Sequence
  Description of Artificial Sequence: Synthetic oligonucleotide
gaguggauacuguaauacua

SEQ ID NO: 245 - RNA, 20 nt, Artificial Sequence
  Description of Artificial Sequence: Synthetic oligonucleotide
agaagugguguuuuugauuc

SEQ ID NO: 246 - RNA, 20 nt, Artificial Sequence
  Description of Artificial Sequence: Synthetic oligonucleotide
uuuugauucagguuuauuag

SEQ ID NO: 247 - RNA, 20 nt, Artificial Sequence
  Description of Artificial Sequence: Synthetic oligonucleotide
uuugauucagguuuauuaga

SEQ ID NO: 248 - RNA, 20 nt, Artificial Sequence
  Description of Artificial Sequence: Synthetic oligonucleotide
ucaaaucucccaaaacucaa

SEQ ID NO: 249 - RNA, 20 nt, Artificial Sequence
  Description of Artificial Sequence: Synthetic oligonucleotide
uuugggagauuugagaauca

SEQ ID NO: 250 - RNA, 20 nt, Artificial Sequence
  Description of Artificial Sequence: Synthetic oligonucleotide
cuagcacuagcucacccugc

SEQ ID NO: 251 - RNA, 20 nt, Artificial Sequence
  Description of Artificial Sequence: Synthetic oligonucleotide
aaucuuuuagccaaccagca

SEQ ID NO: 252 - RNA, 20 nt, Artificial Sequence
  Description of Artificial Sequence: Synthetic oligonucleotide
aucuucauguuuguuucuua

SEQ ID NO: 253 - RNA, 20 nt, Artificial Sequence
  Description of Artificial Sequence: Synthetic oligonucleotide
uuagagucuuacuacccucu

SEQ ID NO: 254 - RNA, 20 nt, Artificial Sequence
  Description of Artificial Sequence: Synthetic oligonucleotide
uuuagagucuuacuacccuc

SEQ ID NO: 255 - RNA, 20 nt, Artificial Sequence
  Description of Artificial Sequence: Synthetic oligonucleotide
aguaacuccaugguucaacu

SEQ ID NO: 256 - RNA, 20 nt, Artificial Sequence
  Description of Artificial Sequence: Synthetic oligonucleotide
aaaggauaguaacuacugcc

SEQ ID NO: 257 - RNA, 20 nt, Artificial Sequence
  Description of Artificial Sequence: Synthetic oligonucleotide
acuauccuuuuugaacuucc

SEQ ID NO: 258 - RNA, 20 nt, Artificial Sequence
  Description of Artificial Sequence: Synthetic oligonucleotide
ugggaacucuuaugugauua

SEQ ID NO: 259 - RNA, 20 nt, Artificial Sequence
  Description of Artificial Sequence: Synthetic oligonucleotide
gcugcuacuucugcccuggc

SEQ ID NO: 260 - RNA, 20 nt, Artificial Sequence
  Description of Artificial Sequence: Synthetic oligonucleotide
agugcacacuucucuugguu

SEQ ID NO: 261 - RNA, 20 nt, Artificial Sequence
  Description of Artificial Sequence: Synthetic oligonucleotide
uggauuaagauuagcguuuc

SEQ ID NO: 262 - RNA, 20 nt, Artificial Sequence
  Description of Artificial Sequence: Synthetic oligonucleotide
ggauuaagauuagcguuucu

SEQ ID NO: 263 - RNA, 20 nt, Artificial Sequence
  Description of Artificial Sequence: Synthetic oligonucleotide
agggccaagauuaguaggag

SEQ ID NO: 264 - RNA, 20 nt, Artificial Sequence
  Description of Artificial Sequence: Synthetic oligonucleotide
gagguagggccaagauuagu

SEQ ID NO: 265 - RNA, 20 nt, Artificial Sequence
  Description of Artificial Sequence: Synthetic oligonucleotide
agcuagcagacagaagaggu

SEQ ID NO: 266 - RNA, 20 nt, Artificial Sequence
  Description of Artificial Sequence: Synthetic oligonucleotide
ccacagcuagcagacagaag

SEQ ID NO: 267 - RNA, 20 nt, Artificial Sequence
  Description of Artificial Sequence: Synthetic oligonucleotide
uguggucuucccauuucauu

SEQ ID NO: 268 - RNA, 20 nt, Artificial Sequence
  Description of Artificial Sequence: Synthetic oligonucleotide
auuuugguagaauugaagcu

SEQ ID NO: 269 - RNA, 20 nt, Artificial Sequence
  Description of Artificial Sequence: Synthetic oligonucleotide
aagcuggguuagagugauga

SEQ ID NO: 270 - RNA, 20 nt, Artificial Sequence
  Description of Artificial Sequence: Synthetic oligonucleotide
uuaauuuucaguugucuauu

SEQ ID NO: 271 - RNA, 20 nt, Artificial Sequence
  Description of Artificial Sequence: Synthetic oligonucleotide
ccccucuccuccccaauaaa

SEQ ID NO: 272 - RNA, 20 nt, Artificial Sequence
  Description of Artificial Sequence: Synthetic oligonucleotide
caccauuuauuggggaggag

SEQ ID NO: 273 - RNA, 20 nt, Artificial Sequence
  Description of Artificial Sequence: Synthetic oligonucleotide
accauuuauuggggaggaga

SEQ ID NO: 274 - RNA, 20 nt, Artificial Sequence
  Description of Artificial Sequence: Synthetic oligonucleotide
uuauuguugguuugugaagg

SEQ ID NO: 275 - RNA, 20 nt, Artificial Sequence
  Description of Artificial Sequence: Synthetic oligonucleotide
uauuguugguuugugaaggu

SEQ ID NO: 276 - RNA, 20 nt, Artificial Sequence
  Description of Artificial Sequence: Synthetic oligonucleotide
guaauuaugcauauauaaag

SEQ ID NO: 277 - RNA, 20 nt, Artificial Sequence
  Description of Artificial Sequence: Synthetic oligonucleotide
uuaugcauauauaaagaggc

SEQ ID NO: 278 - RNA, 20 nt, Artificial Sequence
  Description of Artificial Sequence: Synthetic oligonucleotide
agccuugaaguaaaauugac

SEQ ID NO: 279 - RNA, 20 nt, Artificial Sequence
  Description of Artificial Sequence: Synthetic oligonucleotide
gauuuagcugugugagcacu

SEQ ID NO: 280 - RNA, 20 nt, Artificial Sequence
  Description of Artificial Sequence: Synthetic oligonucleotide
auaacuauuauuacucuaac

SEQ ID NO: 281 - RNA, 20 nt, Artificial Sequence
  Description of Artificial Sequence: Synthetic oligonucleotide
caaccuugucuuuaucggca

SEQ ID NO: 282 - RNA, 20 nt, Artificial Sequence
  Description of Artificial Sequence: Synthetic oligonucleotide
uauaacaaccuugucuuuau

SEQ ID NO: 283 - RNA, 20 nt, Artificial Sequence
  Description of Artificial Sequence: Synthetic oligonucleotide
aagccaugccgauaaagaca

SEQ ID NO: 284 - RNA, 20 nt, Artificial Sequence
  Description of Artificial Sequence: Synthetic oligonucleotide
agcagcagaaucuuauaacc

SEQ ID NO: 285 - RNA, 20 nt, Artificial Sequence
  Description of Artificial Sequence: Synthetic oligonucleotide
acucaucugcugacagugcu

SEQ ID NO: 286 - RNA, 20 nt, Artificial Sequence
  Description of Artificial Sequence: Synthetic oligonucleotide
agcagaugaguagauacacu

SEQ ID NO: 287 - RNA, 20 nt, Artificial Sequence
  Description of Artificial Sequence: Synthetic oligonucleotide
gacaaaccaaugcacuggcu

SEQ ID NO: 288 - RNA, 20 nt, Artificial Sequence
  Description of Artificial Sequence: Synthetic oligonucleotide
ccacuccucacucucaucuu

SEQ ID NO: 289 - RNA, 20 nt, Artificial Sequence
  Description of Artificial Sequence: Synthetic oligonucleotide
gcugguagguagcuagauug

SEQ ID NO: 290 - RNA, 20 nt, Artificial Sequence
  Description of Artificial Sequence: Synthetic oligonucleotide
gguagguagcuagauugagg

SEQ ID NO: 291 - RNA, 20 nt, Artificial Sequence
  Description of Artificial Sequence: Synthetic oligonucleotide
gguagcuagauugaggcggg

SEQ ID NO: 292 - RNA, 20 nt, Artificial Sequence
  Description of Artificial Sequence: Synthetic oligonucleotide
aaauccguguuugugcuagg

SEQ ID NO: 293 - RNA, 20 nt, Artificial Sequence
  Description of Artificial Sequence: Synthetic oligonucleotide
accuccuccuagcacaaaca

SEQ ID NO: 294 - RNA, 20 nt, Artificial Sequence
  Description of Artificial Sequence: Synthetic oligonucleotide
cagcuaguaaaaauaauuuu

SEQ ID NO: 295 - RNA, 20 nt, Artificial Sequence
  Description of Artificial Sequence: Synthetic oligonucleotide
gauauaccuagguucaaacu

SEQ ID NO: 296 - RNA, 20 nt, Artificial Sequence
  Description of Artificial Sequence: Synthetic oligonucleotide
gaccuucucaagauauaccu

SEQ ID NO: 297 - RNA, 20 nt, Artificial Sequence
  Description of Artificial Sequence: Synthetic oligonucleotide
gauauauauguaagaagaac

SEQ ID NO: 298 - RNA, 20 nt, Artificial Sequence
  Description of Artificial Sequence: Synthetic oligonucleotide
caccacuugaaauaaggggg

SEQ ID NO: 299 - RNA, 20 nt, Artificial Sequence
  Description of Artificial Sequence: Synthetic oligonucleotide
acaccacuugaaauaagggg

SEQ ID NO: 300 - RNA, 20 nt, Artificial Sequence
  Description of Artificial Sequence: Synthetic oligonucleotide
gacaccacuugaaauaaggg

SEQ ID NO: 301 - RNA, 20 nt, Artificial Sequence
  Description of Artificial Sequence: Synthetic oligonucleotide
cgacaccacuugaaauaagg

SEQ ID NO: 302 - RNA, 20 nt, Artificial Sequence
  Description of Artificial Sequence: Synthetic oligonucleotide
acgacaccacuugaaauaag

SEQ ID NO: 303 - RNA, 20 nt, Artificial Sequence
  Description of Artificial Sequence: Synthetic oligonucleotide
uacgacaccacuugaaauaa

SEQ ID NO: 304 - RNA, 20 nt, Artificial Sequence
  Description of Artificial Sequence: Synthetic oligonucleotide
auacgacaccacuugaaaua

SEQ ID NO: 305 - RNA, 20 nt, Artificial Sequence
  Description of Artificial Sequence: Synthetic oligonucleotide
cuccccccccuuauuucaag

SEQ ID NO: 306 - RNA, 20 nt, Artificial Sequence
  Description of Artificial Sequence: Synthetic oligonucleotide
cuauucauaccaccauauaa

SEQ ID NO: 307 - RNA, 20 nt, Artificial Sequence
  Description of Artificial Sequence: Synthetic oligonucleotide
cauauaaaggcucuuugucu

SEQ ID NO: 308 - RNA, 20 nt, Artificial Sequence
  Description of Artificial Sequence: Synthetic oligonucleotide
guaaagggcagcauccauuu

SEQ ID NO: 309 - RNA, 20 nt, Artificial Sequence
  Description of Artificial Sequence: Synthetic oligonucleotide
aucaugcuaucuauccuugc

SEQ ID NO: 310 - RNA, 20 nt, Artificial Sequence
  Description of Artificial Sequence: Synthetic oligonucleotide
aaaagcuuaauguugaauuc

SEQ ID NO: 311 - RNA, 20 nt, Artificial Sequence
  Description of Artificial Sequence: Synthetic oligonucleotide
uguugaauucuggcacucau

SEQ ID NO: 312 - RNA, 20 nt, Artificial Sequence
  Description of Artificial Sequence: Synthetic oligonucleotide
guugaauucuggcacucauc

SEQ ID NO: 313 - RNA, 20 nt, Artificial Sequence
  Description of Artificial Sequence: Synthetic oligonucleotide
uuacagauaguaaguccuau

SEQ ID NO: 314 - RNA, 20 nt, Artificial Sequence
  Description of Artificial Sequence: Synthetic oligonucleotide
uacagauaguaaguccuaug

SEQ ID NO: 315 - RNA, 20 nt, Artificial Sequence
  Description of Artificial Sequence: Synthetic oligonucleotide
auucuuucccuauaccccau

SEQ ID NO: 316 - RNA, 20 nt, Artificial Sequence
  Description of Artificial Sequence: Synthetic oligonucleotide
uaguaaguccuaugggguau

SEQ ID NO: 317 - RNA, 20 nt, Artificial Sequence
  Description of Artificial Sequence: Synthetic oligonucleotide
aguaaguccuaugggguaua

SEQ ID NO: 318 - RNA, 20 nt, Artificial Sequence
  Description of Artificial Sequence: Synthetic oligonucleotide
agcaaauacaguuugauacc

SEQ ID NO: 319 - RNA, 20 nt, Artificial Sequence
  Description of Artificial Sequence: Synthetic oligonucleotide
auucaagccacucuauuacc

SEQ ID NO: 320 - RNA, 20 nt, Artificial Sequence
  Description of Artificial Sequence: Synthetic oligonucleotide
gaguggcuugaauccaguuu

SEQ ID NO: 321 - RNA, 20 nt, Artificial Sequence
  Description of Artificial Sequence: Synthetic oligonucleotide
ucauguaugagacacgaauu

SEQ ID NO: 322 - RNA, 20 nt, Artificial Sequence
  Description of Artificial Sequence: Synthetic oligonucleotide
uaugacacuacagaaaaugc

SEQ ID NO: 323 - RNA, 20 nt, Artificial Sequence
  Description of Artificial Sequence: Synthetic oligonucleotide
uucccuuuugaagaucgacu

SEQ ID NO: 324 - RNA, 20 nt, Artificial Sequence
  Description of Artificial Sequence: Synthetic oligonucleotide
aagccuagucgaucuucaaa

SEQ ID NO: 325 - RNA, 20 nt, Artificial Sequence
  Description of Artificial Sequence: Synthetic oligonucleotide
agccuagucgaucuucaaaa

SEQ ID NO: 326 - RNA, 20 nt, Artificial Sequence
  Description of Artificial Sequence: Synthetic oligonucleotide
uucugugauuaacaauauga

SEQ ID NO: 327 - RNA, 20 nt, Artificial Sequence
  Description of Artificial Sequence: Synthetic oligonucleotide
ccacuaccugggaguuaccu

SEQ ID NO: 328 - RNA, 20 nt, Artificial Sequence
  Description of Artificial Sequence: Synthetic oligonucleotide
cccaguaccucccacuaccu

SEQ ID NO: 329 - RNA, 20 nt, Artificial Sequence
  Description of Artificial Sequence: Synthetic oligonucleotide
acccaguaccucccacuacc

SEQ ID NO: 330 - RNA, 20 nt, Artificial Sequence
  Description of Artificial Sequence: Synthetic oligonucleotide
ggagguacuggguuacaccu

SEQ ID NO: 331 - RNA, 20 nt, Artificial Sequence
  Description of Artificial Sequence: Synthetic oligonucleotide
gagguacuggguuacaccug

SEQ ID NO: 332 - RNA, 20 nt, Artificial Sequence
  Description of Artificial Sequence: Synthetic oligonucleotide
ggguuacaccuggggagaag

SEQ ID NO: 333 - RNA, 20 nt, Artificial Sequence
  Description of Artificial Sequence: Synthetic oligonucleotide
aauuaauaggagggagcaca

SEQ ID NO: 334 - RNA, 20 nt, Artificial Sequence
  Description of Artificial Sequence: Synthetic oligonucleotide
guagggagaaauuaauagga

SEQ ID NO: 335 - RNA, 20 nt, Artificial Sequence
  Description of Artificial Sequence: Synthetic oligonucleotide
uucuguagggagaaauuaau

SEQ ID NO: 336 - RNA, 20 nt, Artificial Sequence
  Description of Artificial Sequence: Synthetic oligonucleotide
gagguuagagguuaaaauag

SEQ ID NO: 337 - RNA, 20 nt, Artificial Sequence
  Description of Artificial Sequence: Synthetic oligonucleotide
caauucucacuacccuuggg

SEQ ID NO: 338 - RNA, 20 nt, Artificial Sequence
  Description of Artificial Sequence: Synthetic oligonucleotide
uguuuggcauuguuaugaau

SEQ ID NO: 339 - RNA, 20 nt, Artificial Sequence
  Description of Artificial Sequence: Synthetic oligonucleotide
gagguaaaucaggugauauu

SEQ ID NO: 340 - RNA, 20 nt, Artificial Sequence
  Description of Artificial Sequence: Synthetic oligonucleotide
ucaggugauauuugguacua

SEQ ID NO: 341 - RNA, 20 nt, Artificial Sequence
  Description of Artificial Sequence: Synthetic oligonucleotide
cucucugauuuugucacugg

SEQ ID NO: 342 - RNA, 20 nt, Artificial Sequence
  Description of Artificial Sequence: Synthetic oligonucleotide
accucucugauuuugucacu

SEQ ID NO: 343 - RNA, 20 nt, Artificial Sequence
  Description of Artificial Sequence: Synthetic oligonucleotide
cauuaauaguaauccuuuag

SEQ ID NO: 344 - RNA, 20 nt, Artificial Sequence
  Description of Artificial Sequence: Synthetic oligonucleotide
gucauaaaacuaaccucuaa

SEQ ID NO: 345 - RNA, 20 nt, Artificial Sequence
  Description of Artificial Sequence: Synthetic oligonucleotide
ggcaacuauguuaucggugg

SEQ ID NO: 346 - RNA, 20 nt, Artificial Sequence
  Description of Artificial Sequence: Synthetic oligonucleotide
ccaggcaacuauguuaucgg

SEQ ID NO: 347 - RNA, 20 nt, Artificial Sequence
  Description of Artificial Sequence: Synthetic oligonucleotide
aagccaggcaacuauguuau

SEQ ID NO: 348 - RNA, 20 nt, Artificial Sequence
  Description of Artificial Sequence: Synthetic oligonucleotide
ccaccgauaacauaguugcc

SEQ ID NO: 349 - RNA, 20 nt, Artificial Sequence
  Description of Artificial Sequence: Synthetic oligonucleotide
uauucucuaggcauauagcc

SEQ ID NO: 350 - RNA, 20 nt, Artificial Sequence
  Description of Artificial Sequence: Synthetic oligonucleotide
aacuuccuccaccuacuucc

SEQ ID NO: 351 - RNA, 20 nt, Artificial Sequence
  Description of Artificial Sequence: Synthetic oligonucleotide
uaggcauauagccaggaagu

SEQ ID NO: 352 - RNA, 20 nt, Artificial Sequence
  Description of Artificial Sequence: Synthetic oligonucleotide
gcauauagccaggaaguagg

SEQ ID NO: 353 - RNA, 20 nt, Artificial Sequence
  Description of Artificial Sequence: Synthetic oligonucleotide
uauagccaggaaguaggugg

SEQ ID NO: 354 - RNA, 20 nt, Artificial Sequence
  Description of Artificial Sequence: Synthetic oligonucleotide
cuccaaaaaccaucuauaua

SEQ ID NO: 355 - RNA, 20 nt, Artificial Sequence
  Description of Artificial Sequence: Synthetic oligonucleotide
ggauugccuccuuauauaga

SEQ ID NO: 356 - RNA, 20 nt, Artificial Sequence
  Description of Artificial Sequence: Synthetic oligonucleotide
ccucuuugaugguagcuucc

SEQ ID NO: 357 - RNA, 20 nt, Artificial Sequence
  Description of Artificial Sequence: Synthetic oligonucleotide
uagcuaacugacauaaugcc

SEQ ID NO: 358 - RNA, 20 nt, Artificial Sequence
  Description of Artificial Sequence: Synthetic oligonucleotide
cauuaugucaguuagcuauu

SEQ ID NO: 359 - RNA, 20 nt, Artificial Sequence
  Description of Artificial Sequence: Synthetic oligonucleotide
aguuagcuauuaggcauuuu

SEQ ID NO: 360 - RNA, 20 nt, Artificial Sequence
  Description of Artificial Sequence: Synthetic oligonucleotide
gcauuuuagguugcuuauua

SEQ ID NO: 361 - RNA, 20 nt, Artificial Sequence
  Description of Artificial Sequence: Synthetic oligonucleotide
agguugcuuauuaagguauu

SEQ ID NO: 362 - RNA, 20 nt, Artificial Sequence
  Description of Artificial Sequence: Synthetic oligonucleotide
gguugcuuauuaagguauuu

SEQ ID NO: 363 - RNA, 20 nt, Artificial Sequence
  Description of Artificial Sequence: Synthetic oligonucleotide
cugauuguaauuuuagaggu

SEQ ID NO: 364 - RNA, 20 nt, Artificial Sequence
  Description of Artificial Sequence: Synthetic oligonucleotide
uuuuagagguaggaauaaau

SEQ ID NO: 365 - RNA, 20 nt, Artificial Sequence
  Description of Artificial Sequence: Synthetic oligonucleotide
cuuguaagcaacuguccaua

SEQ ID NO: 366 - RNA, 20 nt, Artificial Sequence
  Description of Artificial Sequence: Synthetic oligonucleotide
caguugcuuacaagugugaa

SEQ ID NO: 367 - RNA, 20 nt, Artificial Sequence
  Description of Artificial Sequence: Synthetic oligonucleotide
ugaaugguuaaagcccaugu

SEQ ID NO: 368 - RNA, 20 nt, Artificial Sequence
  Description of Artificial Sequence: Synthetic oligonucleotide
caacuauuaauuccauuugg

SEQ ID NO: 369 - RNA, 20 nt, Artificial Sequence
  Description of Artificial Sequence: Synthetic oligonucleotide
acaacuauuaauuccauuug

SEQ ID NO: 370 - RNA, 20 nt, Artificial Sequence
  Description of Artificial Sequence: Synthetic oligonucleotide
guaguauagcaguauuaaau

SEQ ID NO: 371 - RNA, 20 nt, Artificial Sequence
  Description of Artificial Sequence: Synthetic oligonucleotide
auauguaaauugcgcagaaa

SEQ ID NO: 372 - RNA, 20 nt, Artificial Sequence
  Description of Artificial Sequence: Synthetic oligonucleotide
auuuaauauacucuugcucc

SEQ ID NO: 373 - RNA, 20 nt, Artificial Sequence
  Description of Artificial Sequence: Synthetic oligonucleotide
cuuuacacauaacagcuuuu

SEQ ID NO: 374 - RNA, 20 nt, Artificial Sequence
  Description of Artificial Sequence: Synthetic oligonucleotide
uuacacauaacagcuuuugg

SEQ ID NO: 375 - RNA, 20 nt, Artificial Sequence
  Description of Artificial Sequence: Synthetic oligonucleotide
ucagaaaagucuuguuuguc

SEQ ID NO: 376 - RNA, 20 nt, Artificial Sequence
  Description of Artificial Sequence: Synthetic oligonucleotide
auucagcuaaugcuccacua

SEQ ID NO: 377 - RNA, 20 nt, Artificial Sequence
  Description of Artificial Sequence: Synthetic oligonucleotide
uucagcuaaugcuccacuag

SEQ ID NO: 378 - RNA, 20 nt, Artificial Sequence
  Description of Artificial Sequence: Synthetic oligonucleotide
gcuaaugcuccacuaggggu

SEQ ID NO: 379 - RNA, 20 nt, Artificial Sequence
  Description of Artificial Sequence: Synthetic oligonucleotide
cuaaugcuccacuaggggua

SEQ ID NO: 380 - RNA, 20 nt, Artificial Sequence
  Description of Artificial Sequence: Synthetic oligonucleotide
aucuuagaucaugagcucuu

SEQ ID NO: 381 - RNA, 20 nt, Artificial Sequence
  Description of Artificial Sequence: Synthetic oligonucleotide
aauaagauuguggcaugagc

SEQ ID NO: 382 - RNA, 20 nt, Artificial Sequence
  Description of Artificial Sequence: Synthetic oligonucleotide
cccuccaaucacgcuguauc

SEQ ID NO: 383 - RNA, 20 nt, Artificial Sequence
  Description of Artificial Sequence: Synthetic oligonucleotide
gcagccagauacagcgugau

SEQ ID NO: 384 - RNA, 20 nt, Artificial Sequence
  Description of Artificial Sequence: Synthetic oligonucleotide
gccagauacagcgugauugg

SEQ ID NO: 385 - RNA, 20 nt, Artificial Sequence
  Description of Artificial Sequence: Synthetic oligonucleotide
ccagauacagcgugauugga

SEQ ID NO: 386 - RNA, 20 nt, Artificial Sequence
  Description of Artificial Sequence: Synthetic oligonucleotide
uauuaucuuugugaguggga

SEQ ID NO: 387 - RNA, 20 nt, Artificial Sequence
  Description of Artificial Sequence: Synthetic oligonucleotide
ggaaggguauauuaagagua

SEQ ID NO: 388 - RNA, 20 nt, Artificial Sequence
  Description of Artificial Sequence: Synthetic oligonucleotide
uagcucugcacuacaaacug

SEQ ID NO: 389 - RNA, 20 nt, Artificial Sequence
  Description of Artificial Sequence: Synthetic oligonucleotide
ugacuuacuagcacuaauug

SEQ ID NO: 390 - RNA, 20 nt, Artificial Sequence
  Description of Artificial Sequence: Synthetic oligonucleotide
uuauaaugucucuuaagcca

SEQ ID NO: 391 - RNA, 20 nt, Artificial Sequence
  Description of Artificial Sequence: Synthetic oligonucleotide
auuauaauuuguauuggagc

SEQ ID NO: 392 - RNA, 20 nt, Artificial Sequence
  Description of Artificial Sequence: Synthetic oligonucleotide
auuggagcuggcaggaaaac

SEQ ID NO: 393 - RNA, 20 nt, Artificial Sequence
  Description of Artificial Sequence: Synthetic oligonucleotide
ugggaauacucugcuuuuau

SEQ ID NO: 394 - RNA, 20 nt, Artificial Sequence
  Description of Artificial Sequence: Synthetic oligonucleotide
ccauaagguacacucaauuu

SEQ ID NO: 395 - RNA, 20 nt, Artificial Sequence
  Description of Artificial Sequence: Synthetic oligonucleotide
ccuaaauugaguguaccuua

SEQ ID NO: 396 - RNA, 20 nt, Artificial Sequence
  Description of Artificial Sequence: Synthetic oligonucleotide
uuuacccauaauaaaccaua

SEQ ID NO: 397 - RNA, 20 nt, Artificial Sequence
  Description of Artificial Sequence: Synthetic oligonucleotide
guguaccuuaugguuuauua

SEQ ID NO: 398 - RNA, 20 nt, Artificial Sequence
  Description of Artificial Sequence: Synthetic oligonucleotide
uguaccuuaugguuuauuau

SEQ ID NO: 399 - RNA, 20 nt, Artificial Sequence
  Description of Artificial Sequence: Synthetic oligonucleotide
uaggaaauagaacagaagcu

SEQ ID NO: 400 - RNA, 20 nt, Artificial Sequence
  Description of Artificial Sequence: Synthetic oligonucleotide
guaaauguuauacuaaaacg

SEQ ID NO: 401 - RNA, 20 nt, Artificial Sequence
  Description of Artificial Sequence: Synthetic oligonucleotide
caguuaauauaggcuuaacu

SEQ ID NO: 402 - RNA, 20 nt, Artificial Sequence
  Description of Artificial Sequence: Synthetic oligonucleotide
aguauguaguaguucucugc

SEQ ID NO: 403 - RNA, 20 nt, Artificial Sequence
  Description of Artificial Sequence: Synthetic oligonucleotide
ccuguuggaaaggagcgaag

SEQ ID NO: 404 - RNA, 20 nt, Artificial Sequence
  Description of Artificial Sequence: Synthetic oligonucleotide
accuguuggaaaggagcgaa

SEQ ID NO: 405 - RNA, 20 nt, Artificial Sequence
  Description of Artificial Sequence: Synthetic oligonucleotide
uugggcaauaccuguuggaa

SEQ ID NO: 406 - RNA, 20 nt, Artificial Sequence
  Description of Artificial Sequence: Synthetic oligonucleotide
ccccuucgcuccuuuccaac

SEQ ID NO: 407 - RNA, 20 nt, Artificial Sequence
  Description of Artificial Sequence: Synthetic oligonucleotide
agagcuugggcaauaccugu

SEQ ID NO: 408 - RNA, 20 nt, Artificial Sequence
  Description of Artificial Sequence: Synthetic oligonucleotide
agaacggcuuaugagagcuu

SEQ ID NO: 409 - RNA, 20 nt, Artificial Sequence
  Description of Artificial Sequence: Synthetic oligonucleotide
aagaacggcuuaugagagcu

SEQ ID NO: 410 - RNA, 20 nt, Artificial Sequence
  Description of Artificial Sequence: Synthetic oligonucleotide
gaugaaguccuuuccagcuu

SEQ ID NO: 411 - RNA, 20 nt, Artificial Sequence
  Description of Artificial Sequence: Synthetic oligonucleotide
uugacagcaggaauaacaga

SEQ ID NO: 412 - RNA, 20 nt, Artificial Sequence
  Description of Artificial Sequence: Synthetic oligonucleotide
ucuacugugcuuuucaaccu

SEQ ID NO: 413 - RNA, 20 nt, Artificial Sequence
  Description of Artificial Sequence: Synthetic oligonucleotide
gguaauaaucgcacagauga

SEQ ID NO: 414 - RNA, 20 nt, Artificial Sequence
  Description of Artificial Sequence: Synthetic oligonucleotide
cuuuacuugcugcaguuaaa

SEQ ID NO: 415 - RNA, 20 nt, Artificial Sequence
  Description of Artificial Sequence: Synthetic oligonucleotide
aaguaaagacguuaauagug

SEQ ID NO: 416 - RNA, 20 nt, Artificial Sequence
  Description of Artificial Sequence: Synthetic oligonucleotide
acguuaauagugagguuuuu

SEQ ID NO: 417 - RNA, 20 nt, Artificial Sequence
  Description of Artificial Sequence: Synthetic oligonucleotide
uagugagguuuuugggaaug

SEQ ID NO: 418 - RNA, 20 nt, Artificial Sequence
  Description of Artificial Sequence: Synthetic oligonucleotide
gggaaugugguaaaaccggg

SEQ ID NO: 419 - RNA, 20 nt, Artificial Sequence
  Description of Artificial Sequence: Synthetic oligonucleotide
uuuguccaaguuaucugaug

SEQ ID NO: 420 - RNA, 20 nt, Artificial Sequence
  Description of Artificial Sequence: Synthetic oligonucleotide
ucagcuaaagcaaaauacag

SEQ ID NO: 421 - RNA, 20 nt, Artificial Sequence
  Description of Artificial Sequence: Synthetic oligonucleotide
ucuaggucccagugauagua

SEQ ID NO: 422 - RNA, 20 nt, Artificial Sequence
  Description of Artificial Sequence: Synthetic oligonucleotide
ggguugcucccuacuaucac

SEQ ID NO: 423 - RNA, 20 nt, Artificial Sequence
  Description of Artificial Sequence: Synthetic oligonucleotide
gguugcucccuacuaucacu

SEQ ID NO: 424 - RNA, 20 nt, Artificial Sequence
  Description of Artificial Sequence: Synthetic oligonucleotide
ucaucuacaucucugaaaaa

SEQ ID NO: 425 - RNA, 20 nt, Artificial Sequence
  Description of Artificial Sequence: Synthetic oligonucleotide
ggguuucuguaugauaguau

SEQ ID NO: 426 - RNA, 20 nt, Artificial Sequence
  Description of Artificial Sequence: Synthetic oligonucleotide
uccuauaccacuaguucauc

SEQ ID NO: 427 - RNA, 20 nt, Artificial Sequence
  Description of Artificial Sequence: Synthetic oligonucleotide
uccugaugaacuagugguau

SEQ ID NO: 428 - RNA, 20 nt, Artificial Sequence
  Description of Artificial Sequence: Synthetic oligonucleotide
agaacucuggagccauacac

SEQ ID NO: 429 - RNA, 20 nt, Artificial Sequence
  Description of Artificial Sequence: Synthetic oligonucleotide
guguauggcuccagaguucu

SEQ ID NO: 430 - RNA, 20 nt, Artificial Sequence
  Description of Artificial Sequence: Synthetic oligonucleotide
accaguucuagacuaauucu

SEQ ID NO: 431 - RNA, 20 nt, Artificial Sequence
  Description of Artificial Sequence: Synthetic oligonucleotide
ucucaaguacagagauccuc

SEQ ID NO: 432 - RNA, 20 nt, Artificial Sequence
  Description of Artificial Sequence: Synthetic oligonucleotide
caguauucucagaacuggga

SEQ ID NO: 433 - RNA, 20 nt, Artificial Sequence
  Description of Artificial Sequence: Synthetic oligonucleotide
ucagccaguauucucagaac

SEQ ID NO: 434 - RNA, 20 nt, Artificial Sequence
  Description of Artificial Sequence: Synthetic oligonucleotide
uacuguaggauuaucaaucu

SEQ ID NO: 435 - RNA, 20 nt, Artificial Sequence
  Description of Artificial Sequence: Synthetic oligonucleotide
auacuguaggauuaucaauc

SEQ ID NO: 436 - RNA, 20 nt, Artificial Sequence
  Description of Artificial Sequence: Synthetic oligonucleotide
uaaucucauauuuaagauug

SEQ ID NO: 437 - RNA, 20 nt, Artificial Sequence
  Description of Artificial Sequence: Synthetic oligonucleotide
ucuagaagcucuuguuuucu

SEQ ID NO: 438 - RNA, 20 nt, Artificial Sequence
  Description of Artificial Sequence: Synthetic oligonucleotide
cucuuuuuguccuccuccgu

SEQ ID NO: 439 - RNA, 20 nt, Artificial Sequence
  Description of Artificial Sequence: Synthetic oligonucleotide
acucuuuuuguccuccuccg

SEQ ID NO: 440 - RNA, 20 nt, Artificial Sequence
  Description of Artificial Sequence: Synthetic oligonucleotide
auucaugagcccuuucacug

SEQ ID NO: 441 - RNA, 20 nt, Artificial Sequence
  Description of Artificial Sequence: Synthetic oligonucleotide
cuugaucuucccuuuauuuc

SEQ ID NO: 442 - RNA, 20 nt, Artificial Sequence
  Description of Artificial Sequence: Synthetic oligonucleotide
aagguauagaaugaauaguu

SEQ ID NO: 443 - RNA, 20 nt, Artificial Sequence
  Description of Artificial Sequence: Synthetic oligonucleotide
ccacacuugauagcuuggua

SEQ ID NO: 444 - RNA, 20 nt, Artificial Sequence
  Description of Artificial Sequence: Synthetic oligonucleotide
uccucccacacuugauagcu

SEQ ID NO: 445 - RNA, 20 nt, Artificial Sequence
  Description of Artificial Sequence: Synthetic oligonucleotide
uaguuaacccaucacuuuga

SEQ ID NO: 446 - RNA, 20 nt, Artificial Sequence
  Description of Artificial Sequence: Synthetic oligonucleotide
cuguaaugcauccuacuuuc

SEQ ID NO: 447 - RNA, 20 nt, Artificial Sequence
  Description of Artificial Sequence: Synthetic oligonucleotide
agacugcuucccuggaaucu

SEQ ID NO: 448 - RNA, 20 nt, Artificial Sequence
  Description of Artificial Sequence: Synthetic oligonucleotide
cagacugcuucccuggaauc

SEQ ID NO: 449 - RNA, 20 nt, Artificial Sequence
  Description of Artificial Sequence: Synthetic oligonucleotide
agauuuagaucacuacagug

SEQ ID NO: 450 - RNA, 20 nt, Artificial Sequence
  Description of Artificial Sequence: Synthetic oligonucleotide
aaguaaacgcaaugcuuaca

SEQ ID NO: 451 - RNA, 20 nt, Artificial Sequence
  Description of Artificial Sequence: Synthetic oligonucleotide
gaaguaaacgcaaugcuuac

SEQ ID NO: 452 - RNA, 20 nt, Artificial Sequence
  Description of Artificial Sequence: Synthetic oligonucleotide
caccuaacaacagcagagua

SEQ ID NO: 453 - RNA, 20 nt, Artificial Sequence
  Description of Artificial Sequence: Synthetic oligonucleotide
aggcagcacuacaggacuag

SEQ ID NO: 454 - RNA, 20 nt, Artificial Sequence
  Description of Artificial Sequence: Synthetic oligonucleotide
uaacagcacgaaggaaggag

SEQ ID NO: 455 - RNA, 20 nt, Artificial Sequence
  Description of Artificial Sequence: Synthetic oligonucleotide
gguauaaaaggauguaugua

SEQ ID NO: 456 - RNA, 20 nt, Artificial Sequence
  Description of Artificial Sequence: Synthetic oligonucleotide
aagcucaaggaacuacacag

SEQ ID NO: 457 - RNA, 20 nt, Artificial Sequence
  Description of Artificial Sequence: Synthetic oligonucleotide
aauaggaguucuacaaaaga

SEQ ID NO: 458 - RNA, 20 nt, Artificial Sequence
  Description of Artificial Sequence: Synthetic oligonucleotide
caucccauuguauaccuaau

SEQ ID NO: 459 - RNA, 20 nt, Artificial Sequence
  Description of Artificial Sequence: Synthetic oligonucleotide
cuacgucaucuacaucauca

SEQ ID NO: 460 - RNA, 20 nt, Artificial Sequence
  Description of Artificial Sequence: Synthetic oligonucleotide
caaacaacgcuggggcagag

SEQ ID NO: 461 - RNA, 20 nt, Artificial Sequence
  Description of Artificial Sequence: Synthetic oligonucleotide
cuaaaauaacaaacaacgcu

SEQ ID NO: 462 - RNA, 20 nt, Artificial Sequence
  Description of Artificial Sequence: Synthetic oligonucleotide
acuaaaauaacaaacaacgc

SEQ ID NO: 463 - RNA, 20 nt, Artificial Sequence
  Description of Artificial Sequence: Synthetic oligonucleotide
caaaaagauuuauugcuccc

SEQ ID NO: 464 - RNA, 20 nt, Artificial Sequence
  Description of Artificial Sequence: Synthetic oligonucleotide
aagaccuaagugcucaccuc

SEQ ID NO: 465 - RNA, 20 nt, Artificial Sequence
  Description of Artificial Sequence: Synthetic oligonucleotide
aaagggcuguauacacgccc

SEQ ID NO: 466 - RNA, 20 nt, Artificial Sequence
  Description of Artificial Sequence: Synthetic oligonucleotide
agagagccacauguacagaa

SEQ ID NO: 467 - RNA, 20 nt, Artificial Sequence
  Description of Artificial Sequence: Synthetic oligonucleotide
uaauuguuucauauugcagc

SEQ ID NO: 468 - RNA, 20 nt, Artificial Sequence
  Description of Artificial Sequence: Synthetic oligonucleotide
caauacccuaggacaaccaa

SEQ ID NO: 469 - RNA, 20 nt, Artificial Sequence
  Description of Artificial Sequence: Synthetic oligonucleotide
aaagcuucccccaauacccu

SEQ ID NO: 470 - RNA, 20 nt, Artificial Sequence
  Description of Artificial Sequence: Synthetic oligonucleotide
acaucugguggucuccugga

SEQ ID NO: 471 - RNA, 20 nt, Artificial Sequence
  Description of Artificial Sequence: Synthetic oligonucleotide
ucauuauuuaacacaucugg

SEQ ID NO: 472 - RNA, 20 nt, Artificial Sequence
  Description of Artificial Sequence: Synthetic oligonucleotide
aauuagcagccugggggauc

SEQ ID NO: 473 - RNA, 20 nt, Artificial Sequence
  Description of Artificial Sequence: Synthetic oligonucleotide
cucagucacauuuggaauca

SEQ ID NO: 474 - RNA, 20 nt, Artificial Sequence
  Description of Artificial Sequence: Synthetic oligonucleotide
acucagucacauuuggaauc

SEQ ID NO: 475 - RNA, 20 nt, Artificial Sequence
  Description of Artificial Sequence: Synthetic oligonucleotide
gguugaccuaucagaaaaaa

SEQ ID NO: 476 - RNA, 20 nt, Artificial Sequence
  Description of Artificial Sequence: Synthetic oligonucleotide
cauauauaucauagucaagc

SEQ ID NO: 477 - RNA, 20 nt, Artificial Sequence
  Description of Artificial Sequence: Synthetic oligonucleotide
uauguaagucccaaaaagaa

SEQ ID NO: 478 - RNA, 20 nt, Artificial Sequence
  Description of Artificial Sequence: Synthetic oligonucleotide
gagaccaguaggacacuauu

SEQ ID NO: 479 - RNA, 20 nt, Artificial Sequence
  Description of Artificial Sequence: Synthetic oligonucleotide
auaccauaaugugcaguuuc

SEQ ID NO: 480 - RNA, 20 nt, Artificial Sequence
  Description of Artificial Sequence: Synthetic oligonucleotide
gggagaccaaguuugcaguc

SEQ ID NO: 481 - RNA, 20 nt, Artificial Sequence
  Description of Artificial Sequence: Synthetic oligonucleotide
gccguggcugcauacaucag

SEQ ID NO: 482 - RNA, 20 nt, Artificial Sequence
  Description of Artificial Sequence: Synthetic oligonucleotide
ggccguggcugcauacauca

SEQ ID NO: 483 - RNA, 20 nt, Artificial Sequence
  Description of Artificial Sequence: Synthetic oligonucleotide
uggccguggcugcauacauc

SEQ ID NO: 484 - RNA, 20 nt, Artificial Sequence
  Description of Artificial Sequence: Synthetic oligonucleotide
caaccaacuuacucagacac

SEQ ID NO: 485 - RNA, 20 nt, Artificial Sequence
  Description of Artificial Sequence: Synthetic oligonucleotide
cuacaaucuccacaaaucuc

SEQ ID NO: 486 - RNA, 20 nt, Artificial Sequence
  Description of Artificial Sequence: Synthetic oligonucleotide
ccgagaagcaagaaaaccac

SEQ ID NO: 487 - RNA, 20 nt, Artificial Sequence
  Description of Artificial Sequence: Synthetic oligonucleotide
caagguugaaguacuaguga

SEQ ID NO: 488 - RNA, 20 nt, Artificial Sequence
  Description of Artificial Sequence: Synthetic oligonucleotide
caggaagcugcagcucuaca

SEQ ID NO: 489 - RNA, 20 nt, Artificial Sequence
  Description of Artificial Sequence: Synthetic oligonucleotide
aacuaugcaguguaggcagc

SEQ ID NO: 490 - RNA, 20 nt, Artificial Sequence
  Description of Artificial Sequence: Synthetic oligonucleotide
aggggugaaacaaaaauucu

SEQ ID NO: 491 - RNA, 20 nt, Artificial Sequence
  Description of Artificial Sequence: Synthetic oligonucleotide
cacuguagggcucuguauuc

SEQ ID NO: 492 - RNA, 20 nt, Artificial Sequence
  Description of Artificial Sequence: Synthetic oligonucleotide
guucagggaugaaauuacua

SEQ ID NO: 493 - RNA, 20 nt, Artificial Sequence
  Description of Artificial Sequence: Synthetic oligonucleotide
ucauggagagaacauguuca

SEQ ID NO: 494 - RNA, 20 nt, Artificial Sequence
  Description of Artificial Sequence: Synthetic oligonucleotide
gcuaucuuugccacacuuca

SEQ ID NO: 495 - RNA, 20 nt, Artificial Sequence
  Description of Artificial Sequence: Synthetic oligonucleotide
auguagguuagagcagccag

SEQ ID NO: 496 - RNA, 20 nt, Artificial Sequence
  Description of Artificial Sequence: Synthetic oligonucleotide
aacaguuaugagaacgaugu

SEQ ID NO: 497 - RNA, 20 nt, Artificial Sequence
  Description of Artificial Sequence: Synthetic oligonucleotide
agugucacuugaauccucag

SEQ ID NO: 498 - RNA, 20 nt, Artificial Sequence
  Description of Artificial Sequence: Synthetic oligonucleotide
guucauggaugggacuaaau

SEQ ID NO: 499 - RNA, 20 nt, Artificial Sequence
  Description of Artificial Sequence: Synthetic oligonucleotide
uguucauggaugggacuaaa

SEQ ID NO: 500 - RNA, 20 nt, Artificial Sequence
  Description of Artificial Sequence: Synthetic oligonucleotide
auccuaggcaccugaaugga

SEQ ID NO: 501 - RNA, 20 nt, Artificial Sequence
  Description of Artificial Sequence: Synthetic oligonucleotide
cccaauccuaggcaccugaa

SEQ ID NO: 502 - RNA, 20 nt, Artificial Sequence
  Description of Artificial Sequence: Synthetic oligonucleotide
aguaaccuuaauuuccagau

SEQ ID NO: 503 - RNA, 20 nt, Artificial Sequence
  Description of Artificial Sequence: Synthetic oligonucleotide
guuacuauuaguaaaaauag

SEQ ID NO: 504 - RNA, 20 nt, Artificial Sequence
  Description of Artificial Sequence: Synthetic oligonucleotide
uuacuggauccagcaauaca

SEQ ID NO: 505 - RNA, 20 nt, Artificial Sequence
  Description of Artificial Sequence: Synthetic oligonucleotide
uuguuccuagacaacuuuac

SEQ ID NO: 506 - RNA, 20 nt, Artificial Sequence
  Description of Artificial Sequence: Synthetic oligonucleotide
uggauccaguaaaguugucu

SEQ ID NO: 507 - RNA, 20 nt, Artificial Sequence
  Description of Artificial Sequence: Synthetic oligonucleotide
cucuuaacuuuugaagacaa

SEQ ID NO: 508 - RNA, 20 nt, Artificial Sequence
  Description of Artificial Sequence: Synthetic oligonucleotide
ucaauauaaaauaacuccua

SEQ ID NO: 509 - RNA, 20 nt, Artificial Sequence
  Description of Artificial Sequence: Synthetic oligonucleotide
ucaagaccagaaacgccacc

SEQ ID NO: 510 - RNA, 20 nt, Artificial Sequence
  Description of Artificial Sequence: Synthetic oligonucleotide
aacuacagccagcucaauau

SEQ ID NO: 511 - RNA, 20 nt, Artificial Sequence
  Description of Artificial Sequence: Synthetic oligonucleotide
acucucaucugcuucagaau

SEQ ID NO: 512 - RNA, 20 nt, Artificial Sequence
  Description of Artificial Sequence: Synthetic oligonucleotide
aacucucaucugcuucagaa

SEQ ID NO: 513 - RNA, 20 nt, Artificial Sequence
  Description of Artificial Sequence: Synthetic oligonucleotide
gaccuuauaagaaacaccag

SEQ ID NO: 514 - RNA, 20 nt, Artificial Sequence
  Description of Artificial Sequence: Synthetic oligonucleotide
ucaucaagaggugguccgcc

SEQ ID NO: 515 - RNA, 20 nt, Artificial Sequence
  Description of Artificial Sequence: Synthetic oligonucleotide
cguuauccauguauuuggca

SEQ ID NO: 516 - RNA, 20 nt, Artificial Sequence
  Description of Artificial Sequence: Synthetic oligonucleotide
caccucguuauccauguauu

SEQ ID NO: 517 - RNA, 20 nt, Artificial Sequence
  Description of Artificial Sequence: Synthetic oligonucleotide
auuguuugcauauagaaauu

SEQ ID NO: 518 - RNA, 20 nt, Artificial Sequence
  Description of Artificial Sequence: Synthetic oligonucleotide
caaagaguaaucuggacuac

SEQ ID NO: 519 - RNA, 20 nt, Artificial Sequence
  Description of Artificial Sequence: Synthetic oligonucleotide
aaauauagcaaagaguaauc

SEQ ID NO: 520 - RNA, 20 nt, Artificial Sequence
  Description of Artificial Sequence: Synthetic oligonucleotide
cuauauuuguuucauacauc

SEQ ID NO: 521 - RNA, 20 nt, Artificial Sequence
  Description of Artificial Sequence: Synthetic oligonucleotide
uaccaacaucuaccuacaac

SEQ ID NO: 522 - RNA, 20 nt, Artificial Sequence
  Description of Artificial Sequence: Synthetic oligonucleotide
uaccaguuguagguagaugu

SEQ ID NO: 523 - RNA, 20 nt, Artificial Sequence
  Description of Artificial Sequence: Synthetic oligonucleotide
acaccugcaacagaauaugu

SEQ ID NO: 524 - RNA, 20 nt, Artificial Sequence
  Description of Artificial Sequence: Synthetic oligonucleotide
gcggaaaaauguccaccaac

SEQ ID NO: 525 - RNA, 20 nt, Artificial Sequence
  Description of Artificial Sequence: Synthetic oligonucleotide
gucaaacauacaccuacuac

SEQ ID NO: 526 - RNA, 20 nt, Artificial Sequence
  Description of Artificial Sequence: Synthetic oligonucleotide
uggcaccaggagaacuuuug

SEQ ID NO: 527 - RNA, 20 nt, Artificial Sequence
  Description of Artificial Sequence: Synthetic oligonucleotide
cagacccccaaaaaggaacg

SEQ ID NO: 528 - RNA, 20 nt, Artificial Sequence
  Description of Artificial Sequence: Synthetic oligonucleotide
aaagagacagacccccaaaa

SEQ ID NO: 529 - RNA, 20 nt, Artificial Sequence
  Description of Artificial Sequence: Synthetic oligonucleotide
aaaaggagucuugccucagu

SEQ ID NO: 530 - RNA, 20 nt, Artificial Sequence
  Description of Artificial Sequence: Synthetic oligonucleotide
cacguuaacaccagacaaaa

SEQ ID NO: 531 - RNA, 20 nt, Artificial Sequence
  Description of Artificial Sequence: Synthetic oligonucleotide
aguaccuguucucuuaagag

SEQ ID NO: 532 - RNA, 20 nt, Artificial Sequence
  Description of Artificial Sequence: Synthetic oligonucleotide
gcaaggaagagucacccaaa

SEQ ID NO: 533 - RNA, 20 nt, Artificial Sequence
  Description of Artificial Sequence: Synthetic oligonucleotide
aaagccuaaagaagucauga

SEQ ID NO: 534 - RNA, 20 nt, Artificial Sequence
  Description of Artificial Sequence: Synthetic oligonucleotide
aaaagccuaaagaagucaug

SEQ ID NO: 535 - RNA, 20 nt, Artificial Sequence
  Description of Artificial Sequence: Synthetic oligonucleotide
aaaguacagaucccugccca

SEQ ID NO: 536 - RNA, 20 nt, Artificial Sequence
  Description of Artificial Sequence: Synthetic oligonucleotide
aggugagcaaacuuacugcc

SEQ ID NO: 537 - RNA, 20 nt, Artificial Sequence
  Description of Artificial Sequence: Synthetic oligonucleotide
ugaacccugaaagggaaaca

SEQ ID NO: 538 - RNA, 20 nt, Artificial Sequence
  Description of Artificial Sequence: Synthetic oligonucleotide
ccugauggugaacccugaaa

SEQ ID NO: 539 - RNA, 20 nt, Artificial Sequence
  Description of Artificial Sequence: Synthetic oligonucleotide
cccugauggugaacccugaa

SEQ ID NO: 540 - RNA, 20 nt, Artificial Sequence
  Description of Artificial Sequence: Synthetic oligonucleotide
aguacauauaagagccaagg

SEQ ID NO: 541 - RNA, 20 nt, Artificial Sequence
  Description of Artificial Sequence: Synthetic oligonucleotide
gaaaguacauauaagagcca

SEQ ID NO: 542 - RNA, 20 nt, Artificial Sequence
  Description of Artificial Sequence: Synthetic oligonucleotide
ggagugguugucaaaaucug

SEQ ID NO: 543 - RNA, 20 nt, Artificial Sequence
  Description of Artificial Sequence: Synthetic oligonucleotide
gaacccuuggugcacuguug

SEQ ID NO: 544 - RNA, 20 nt, Artificial Sequence
  Description of Artificial Sequence: Synthetic oligonucleotide
aggggaaggcuucgggacac

SEQ ID NO: 545 - RNA, 20 nt, Artificial Sequence
  Description of Artificial Sequence: Synthetic oligonucleotide
ggggccaauacuauacagag

SEQ ID NO: 546 - RNA, 20 nt, Artificial Sequence
  Description of Artificial Sequence: Synthetic oligonucleotide
aacacacuguacccacagau

SEQ ID NO: 547 - RNA, 20 nt, Artificial Sequence
  Description of Artificial Sequence: Synthetic oligonucleotide
acuuacucuuacccaaccaa

SEQ ID NO: 548 - RNA, 20 nt, Artificial Sequence
  Description of Artificial Sequence: Synthetic oligonucleotide
uuaaaagcaguuggcaccgc

SEQ ID NO: 549 - RNA, 20 nt, Artificial Sequence
  Description of Artificial Sequence: Synthetic oligonucleotide
uuacuuauauaagugggagg

SEQ ID NO: 550 - RNA, 20 nt, Artificial Sequence
  Description of Artificial Sequence: Synthetic oligonucleotide
auuacuuauauaagugggag

SEQ ID NO: 551 - RNA, 20 nt, Artificial Sequence
  Description of Artificial Sequence: Synthetic oligonucleotide
uauuacuuauauaaguggga

SEQ ID NO: 552 - RNA, 20 nt, Artificial Sequence
  Description of Artificial Sequence: Synthetic oligonucleotide
auauuacuuauauaaguggg

SEQ ID NO: 553 - RNA, 20 nt, Artificial Sequence
  Description of Artificial Sequence: Synthetic oligonucleotide
ggaauauuacuuauauaagu

SEQ ID NO: 554 - RNA, 20 nt, Artificial Sequence
  Description of Artificial Sequence: Synthetic oligonucleotide
uggaauauuacuuauauaag

SEQ ID NO: 555 - RNA, 20 nt, Artificial Sequence
  Description of Artificial Sequence: Synthetic oligonucleotide
cauuccuaacaagguacaca

SEQ ID NO: 556 - RNA, 20 nt, Artificial Sequence
  Description of Artificial Sequence: Synthetic oligonucleotide
uggagaguacgagcaaagca

SEQ ID NO: 557 - RNA, 20 nt, Artificial Sequence
  Description of Artificial Sequence: Synthetic oligonucleotide
cugcaaaagagagaugccuc

SEQ ID NO: 558 - RNA, 20 nt, Artificial Sequence
  Description of Artificial Sequence: Synthetic oligonucleotide
uacaagguaugcacacacag

SEQ ID NO: 559 - RNA, 20 nt, Artificial Sequence
  Description of Artificial Sequence: Synthetic oligonucleotide
uucaggaaucaaguuaaaua

SEQ ID NO: 560 - RNA, 20 nt, Artificial Sequence
  Description of Artificial Sequence: Synthetic oligonucleotide
uauuagagcgagagccuuuc

SEQ ID NO: 561 - RNA, 20 nt, Artificial Sequence
  Description of Artificial Sequence: Synthetic oligonucleotide
acgaacugcauuggucugcu

SEQ ID NO: 562 - RNA, 20 nt, Artificial Sequence
  Description of Artificial Sequence: Synthetic oligonucleotide
aaagauguuacgaacugcau

SEQ ID NO: 563 - RNA, 20 nt, Artificial Sequence
  Description of Artificial Sequence: Synthetic oligonucleotide
guucguaacaucuuuuauau

SEQ ID NO: 564 - RNA, 20 nt, Artificial Sequence
  Description of Artificial Sequence: Synthetic oligonucleotide
uucguaacaucuuuuauaua

SEQ ID NO: 565 - RNA, 20 nt, Artificial Sequence
  Description of Artificial Sequence: Synthetic oligonucleotide
ucguaacaucuuuuauauag

SEQ ID NO: 566 - RNA, 20 nt, Artificial Sequence
  Description of Artificial Sequence: Synthetic oligonucleotide
cugaagacagcaaguucuca

SEQ ID NO: 567 - RNA, 20 nt, Artificial Sequence
  Description of Artificial Sequence: Synthetic oligonucleotide
gaaggacaugggccauagcc

SEQ ID NO: 568 - RNA, 20 nt, Artificial Sequence
  Description of Artificial Sequence: Synthetic oligonucleotide
uuucguagacuggaaggaca

SEQ ID NO: 569 - RNA, 20 nt, Artificial Sequence
  Description of Artificial Sequence: Synthetic oligonucleotide
ugcugcuuucguagacugga

SEQ ID NO: 570 - RNA, 20 nt, Artificial Sequence
  Description of Artificial Sequence: Synthetic oligonucleotide
aaaaugcugcuuucguagac

SEQ ID NO: 571 - RNA, 20 nt, Artificial Sequence
  Description of Artificial Sequence: Synthetic oligonucleotide
agaagacaagcggagaggcc

SEQ ID NO: 572 - RNA, 20 nt, Artificial Sequence
  Description of Artificial Sequence: Synthetic oligonucleotide
gagaagacaagcggagaggc

SEQ ID NO: 573 - RNA, 20 nt, Artificial Sequence
  Description of Artificial Sequence: Synthetic oligonucleotide
gucuauuauaaacgacugag

SEQ ID NO: 574 - RNA, 20 nt, Artificial Sequence
  Description of Artificial Sequence: Synthetic oligonucleotide
caacccagaaguggacaugg

SEQ ID NO: 575 - RNA, 20 nt, Artificial Sequence
  Description of Artificial Sequence: Synthetic oligonucleotide
gauacgaugcagaaaauucu

SEQ ID NO: 576 - RNA, 20 nt, Artificial Sequence
  Description of Artificial Sequence: Synthetic oligonucleotide
cuaggucugugguucuagga

SEQ ID NO: 577 - RNA, 20 nt, Artificial Sequence
  Description of Artificial Sequence: Synthetic oligonucleotide
ccuaccucuguucucaagcu

SEQ ID NO: 578 - RNA, 20 nt, Artificial Sequence
  Description of Artificial Sequence: Synthetic oligonucleotide
guaaccuagcuugagaacag

SEQ ID NO: 579 - RNA, 20 nt, Artificial Sequence
  Description of Artificial Sequence: Synthetic oligonucleotide
ccuagcuugagaacagaggu

SEQ ID NO: 580 - RNA, 20 nt, Artificial Sequence
  Description of Artificial Sequence: Synthetic oligonucleotide
ucacaagcuaguuucaggua

SEQ ID NO: 581 - RNA, 20 nt, Artificial Sequence
  Description of Artificial Sequence: Synthetic oligonucleotide
cacaagcuaguuucagguau

SEQ ID NO: 582 - RNA, 20 nt, Artificial Sequence
  Description of Artificial Sequence: Synthetic oligonucleotide
acaagcuaguuucagguaug

SEQ ID NO: 583 - RNA, 20 nt, Artificial Sequence
  Description of Artificial Sequence: Synthetic oligonucleotide
uaugguaaaauuaguaaugg

SEQ ID NO: 584 - RNA, 20 nt, Artificial Sequence
  Description of Artificial Sequence: Synthetic oligonucleotide
uucucuagaauaaugaugcu

SEQ ID NO: 585 - RNA, 20 nt, Artificial Sequence
  Description of Artificial Sequence: Synthetic oligonucleotide
auuuaguaaguaaucagugu

SEQ ID NO: 586 - RNA, 20 nt, Artificial Sequence
  Description of Artificial Sequence: Synthetic oligonucleotide
ucaaaaaaagcagugagguu

SEQ ID NO: 587 - RNA, 20 nt, Artificial Sequence
  Description of Artificial Sequence: Synthetic oligonucleotide
auaauaguguauuguagcua

SEQ ID NO: 588 - RNA, 20 nt, Artificial Sequence
  Description of Artificial Sequence: Synthetic oligonucleotide
auguuaauaagacaaaaucu

SEQ ID NO: 589 - RNA, 20 nt, Artificial Sequence
  Description of Artificial Sequence: Synthetic oligonucleotide
aauugacuuuuugacacacu

SEQ ID NO: 590 - RNA, 20 nt, Artificial Sequence
  Description of Artificial Sequence: Synthetic oligonucleotide
acuugguccaguugauuuga

SEQ ID NO: 591 - RNA, 20 nt, Artificial Sequence
  Description of Artificial Sequence: Synthetic oligonucleotide
cuugguccaguugauuugau

SEQ ID NO: 592 - RNA, 20 nt, Artificial Sequence
  Description of Artificial Sequence: Synthetic oligonucleotide
guuaaccucaacacaaaaga

SEQ ID NO: 593 - RNA, 20 nt, Artificial Sequence
  Description of Artificial Sequence: Synthetic oligonucleotide
uggucagaguucaauaagag

SEQ ID NO: 594 - RNA, 20 nt, Artificial Sequence
  Description of Artificial Sequence: Synthetic oligonucleotide
uucauauacuuuaucaacaa

SEQ ID NO: 595 - RNA, 20 nt, Artificial Sequence
  Description of Artificial Sequence: Synthetic oligonucleotide
auucaguagagacacccacu

SEQ ID NO: 596 - RNA, 20 nt, Artificial Sequence
  Description of Artificial Sequence: Synthetic oligonucleotide
ugaauuggcaucauguacuu

SEQ ID NO: 597 - RNA, 20 nt, Artificial Sequence
  Description of Artificial Sequence: Synthetic oligonucleotide
agcugaaacaucugguuaga

SEQ ID NO: 598 - RNA, 20 nt, Artificial Sequence
  Description of Artificial Sequence: Synthetic oligonucleotide
gaaaucucagucagugguuu

SEQ ID NO: 599 - RNA, 20 nt, Artificial Sequence
  Description of Artificial Sequence: Synthetic oligonucleotide
agguacuauaacgaucaaua

SEQ ID NO: 600 - RNA, 20 nt, Artificial Sequence
  Description of Artificial Sequence: Synthetic oligonucleotide
aaauuuuucuacacaacaag

SEQ ID NO: 601 - RNA, 20 nt, Artificial Sequence
  Description of Artificial Sequence: Synthetic oligonucleotide
uccacuuuaagaagauacau

SEQ ID NO: 602 - RNA, 20 nt, Artificial Sequence
  Description of Artificial Sequence: Synthetic oligonucleotide
uguacuugaaggucuuauua

SEQ ID NO: 603 - RNA, 20 nt, Artificial Sequence
  Description of Artificial Sequence: Synthetic oligonucleotide
uauugcuugugggaugacac

SEQ ID NO: 604 - RNA, 20 nt, Artificial Sequence
  Description of Artificial Sequence: Synthetic oligonucleotide
aggcuauuagacuggaagcg

SEQ ID NO: 605 - RNA, 20 nt, Artificial Sequence
  Description of Artificial Sequence: Synthetic oligonucleotide
aaaggcuauuagacuggaag

SEQ ID NO: 606 - RNA, 20 nt, Artificial Sequence
  Description of Artificial Sequence: Synthetic oligonucleotide
aggggaaaaggcuauuagac

SEQ ID NO: 607 - RNA, 20 nt, Artificial Sequence
  Description of Artificial Sequence: Synthetic oligonucleotide
cagaaagaugauuacuucag

SEQ ID NO: 608 - RNA, 20 nt, Artificial Sequence
  Description of Artificial Sequence: Synthetic oligonucleotide
uaacugcaugccguguuaua

SEQ ID NO: 609 - RNA, 20 nt, Artificial Sequence
  Description of Artificial Sequence: Synthetic oligonucleotide
ucauauaauccucagcauuc

SEQ ID NO: 610 - RNA, 20 nt, Artificial Sequence
  Description of Artificial Sequence: Synthetic oligonucleotide
guagcuaugccagaaugcug

SEQ ID NO: 611 - RNA, 20 nt, Artificial Sequence
  Description of Artificial Sequence: Synthetic oligonucleotide
gaggucucuggcaacugggg

SEQ ID NO: 612 - RNA, 20 nt, Artificial Sequence
  Description of Artificial Sequence: Synthetic oligonucleotide
aaagaggucucuggcaacug

SEQ ID NO: 613 - RNA, 20 nt, Artificial Sequence
  Description of Artificial Sequence: Synthetic oligonucleotide
gcaaagaggucucuggcaac

SEQ ID NO: 614 - RNA, 20 nt, Artificial Sequence
  Description of Artificial Sequence: Synthetic oligonucleotide
gaucagaugaugcuucagau

SEQ ID NO: 615 - RNA, 20 nt, Artificial Sequence
  Description of Artificial Sequence: Synthetic oligonucleotide
uacggccaggcauggcuuaa

SEQ ID NO: 616 - RNA, 20 nt, Artificial Sequence
  Description of Artificial Sequence: Synthetic oligonucleotide
cugauccuuuaagccaugcc

SEQ ID NO: 617 - RNA, 20 nt, Artificial Sequence
  Description of Artificial Sequence: Synthetic oligonucleotide
uaagauaaacgagacaugga

SEQ ID NO: 618 - RNA, 20 nt, Artificial Sequence
  Description of Artificial Sequence: Synthetic oligonucleotide
ccugggagaacucuuuucau

SEQ ID NO: 619 - RNA, 20 nt, Artificial Sequence
  Description of Artificial Sequence: Synthetic oligonucleotide
ccaaugaaaagaguucuccc

SEQ ID NO: 620 - RNA, 20 nt, Artificial Sequence
  Description of Artificial Sequence: Synthetic oligonucleotide
uugaguugcuguugggccau

SEQ ID NO: 621 - RNA, 20 nt, Artificial Sequence
  Description of Artificial Sequence: Synthetic oligonucleotide
guugcuguugggccauagga

SEQ ID NO: 622 - RNA, 20 nt, Artificial Sequence
  Description of Artificial Sequence: Synthetic oligonucleotide
aaugucuauaaugcugucug

SEQ ID NO: 623 - RNA, 20 nt, Artificial Sequence
  Description of Artificial Sequence: Synthetic oligonucleotide
acuagccacuguauuucaac

SEQ ID NO: 624 - RNA, 20 nt, Artificial Sequence
  Description of Artificial Sequence: Synthetic oligonucleotide
ucaauccaguugaaauacag

SEQ ID NO: 625 - RNA, 20 nt, Artificial Sequence
  Description of Artificial Sequence: Synthetic oligonucleotide
aacaaugacagucuuacuuu

SEQ ID NO: 626 - RNA, 20 nt, Artificial Sequence
  Description of Artificial Sequence: Synthetic oligonucleotide
ugauuaguauuuccaagugg

SEQ ID NO: 627 - RNA, 20 nt, Artificial Sequence
  Description of Artificial Sequence: Synthetic oligonucleotide
cauggauuaauaccuccacu

SEQ ID NO: 628 - RNA, 20 nt, Artificial Sequence
  Description of Artificial Sequence: Synthetic oligonucleotide
cacuucaaauuucugcaaca

SEQ ID NO: 629 - RNA, 20 nt, Artificial Sequence
  Description of Artificial Sequence: Synthetic oligonucleotide
gacuaauacaaguagaagau

SEQ ID NO: 630 - RNA, 20 nt, Artificial Sequence
  Description of Artificial Sequence: Synthetic oligonucleotide
gaaauuguagaaucauagcc

SEQ ID NO: 631 - RNA, 20 nt, Artificial Sequence
  Description of Artificial Sequence: Synthetic oligonucleotide
uagcaagcuuccuaagcugu

SEQ ID NO: 632 - RNA, 20 nt, Artificial Sequence
  Description of Artificial Sequence: Synthetic oligonucleotide
guguuugaaauuuggcuagu

SEQ ID NO: 633 - RNA, 20 nt, Artificial Sequence
  Description of Artificial Sequence: Synthetic oligonucleotide
uguuugaaauuuggcuaguu

SEQ ID NO: 634 - RNA, 20 nt, Artificial Sequence
  Description of Artificial Sequence: Synthetic oligonucleotide
ugaaauuuggcuaguugggu

SEQ ID NO: 635 - RNA, 20 nt, Artificial Sequence
  Description of Artificial Sequence: Synthetic oligonucleotide
gguuggcuauaguaaucauc

SEQ ID NO: 636 - RNA, 20 nt, Artificial Sequence
  Description of Artificial Sequence: Synthetic oligonucleotide
ggaagaaccucuucuugcuu

SEQ ID NO: 637 - RNA, 20 nt, Artificial Sequence
  Description of Artificial Sequence: Synthetic oligonucleotide
gcaacaaauugaucccugug

SEQ ID NO: 638 - RNA, 20 nt, Artificial Sequence
  Description of Artificial Sequence: Synthetic oligonucleotide
uaugucuaagaaaacccuug

SEQ ID NO: 639 - RNA, 20 nt, Artificial Sequence
  Description of Artificial Sequence: Synthetic oligonucleotide
aaagaaccaaggucuauaua

SEQ ID NO: 640 - RNA, 20 nt, Artificial Sequence
  Description of Artificial Sequence: Synthetic oligonucleotide
cauguuguugguuagaguug

SEQ ID NO: 641 - RNA, 20 nt, Artificial Sequence
  Description of Artificial Sequence: Synthetic oligonucleotide
aucucaagguuaaauuucuc

SEQ ID NO: 642 - RNA, 20 nt, Artificial Sequence
  Description of Artificial Sequence: Synthetic oligonucleotide
auguaaguuaggcaaucuca

SEQ ID NO: 643 - RNA, 20 nt, Artificial Sequence
  Description of Artificial Sequence: Synthetic oligonucleotide
auuucaaauccuuggauucg

SEQ ID NO: 644 - RNA, 20 nt, Artificial Sequence
  Description of Artificial Sequence: Synthetic oligonucleotide
aauuucaaauccuuggauuc

SEQ ID NO: 645 - RNA, 20 nt, Artificial Sequence
  Description of Artificial Sequence: Synthetic oligonucleotide
cugcagaauccccgaaucca

SEQ ID NO: 646 - RNA, 20 nt, Artificial Sequence
  Description of Artificial Sequence: Synthetic oligonucleotide
uacaaucucaucuagaauga

SEQ ID NO: 647 - RNA, 20 nt, Artificial Sequence
  Description of Artificial Sequence: Synthetic oligonucleotide
cuuggcaauacagcuggaaa

SEQ ID NO: 648 - RNA, 20 nt, Artificial Sequence
  Description of Artificial Sequence: Synthetic oligonucleotide
acuuggcaauacagcuggaa

SEQ ID NO: 649 - RNA, 20 nt, Artificial Sequence
  Description of Artificial Sequence: Synthetic oligonucleotide
cuguuacuuggcaauacagc

SEQ ID NO: 650 - RNA, 20 nt, Artificial Sequence
  Description of Artificial Sequence: Synthetic oligonucleotide
acuaaauacuaacuguuacu

SEQ ID NO: 651 - RNA, 20 nt, Artificial Sequence
  Description of Artificial Sequence: Synthetic oligonucleotide
ugcuguacuauuugcucaua

SEQ ID NO: 652 - RNA, 20 nt, Artificial Sequence
  Description of Artificial Sequence: Synthetic oligonucleotide
uggggaguauagugcugggu

SEQ ID NO: 653 - RNA, 20 nt, Artificial Sequence
  Description of Artificial Sequence: Synthetic oligonucleotide
auggggaguauagugcuggg

SEQ ID NO: 654 - RNA, 20 nt, Artificial Sequence
  Description of Artificial Sequence: Synthetic oligonucleotide
cuuauggggaguauagugcu

SEQ ID NO: 655 - RNA, 20 nt, Artificial Sequence
  Description of Artificial Sequence: Synthetic oligonucleotide
acuuauggggaguauagugc

SEQ ID NO: 656 - RNA, 20 nt, Artificial Sequence
  Description of Artificial Sequence: Synthetic oligonucleotide
gcuauuuuugguaacuuaug

SEQ ID NO: 657 - RNA, 20 nt, Artificial Sequence
  Description of Artificial Sequence: Synthetic oligonucleotide
agcuauuuuugguaacuuau

SEQ ID NO: 658 - RNA, 20 nt, Artificial Sequence
  Description of Artificial Sequence: Synthetic oligonucleotide
uugcagcaguacuuauauac

SEQ ID NO: 659 - RNA, 20 nt, Artificial Sequence
  Description of Artificial Sequence: Synthetic oligonucleotide
cuagcaauaagaguauuaag

SEQ ID NO: 660 - RNA, 20 nt, Artificial Sequence
  Description of Artificial Sequence: Synthetic oligonucleotide
uuccaccaauuagacuagca

SEQ ID NO: 661 - RNA, 20 nt, Artificial Sequence
  Description of Artificial Sequence: Synthetic oligonucleotide
uaaauugugagagugcucaa

SEQ ID NO: 662 - RNA, 20 nt, Artificial Sequence
  Description of Artificial Sequence: Synthetic oligonucleotide
cauuacaacuuaaguucugu

SEQ ID NO: 663 - RNA, 20 nt, Artificial Sequence
  Description of Artificial Sequence: Synthetic oligonucleotide
auguuaauugauggaacuga

SEQ ID NO: 664 - RNA, 20 nt, Artificial Sequence
  Description of Artificial Sequence: Synthetic oligonucleotide
guagcuuaucauacauaaua

SEQ ID NO: 665 - RNA, 20 nt, Artificial Sequence
  Description of Artificial Sequence: Synthetic oligonucleotide
gaguucacucacauuaaagc

SEQ ID NO: 666 - RNA, 20 nt, Artificial Sequence
  Description of Artificial Sequence: Synthetic oligonucleotide
uuaacagcacagugaaacca

SEQ ID NO: 667 - RNA, 20 nt, Artificial Sequence
  Description of Artificial Sequence: Synthetic oligonucleotide
agcauggcugaaacuuucuu

SEQ ID NO: 668 - RNA, 20 nt, Artificial Sequence
  Description of Artificial Sequence: Synthetic oligonucleotide
augguuuccuguucacauau

SEQ ID NO: 669 - RNA, 20 nt, Artificial Sequence
  Description of Artificial Sequence: Synthetic oligonucleotide
ggucugaaggagcaguuuua

SEQ ID NO: 670 - RNA, 20 nt, Artificial Sequence
  Description of Artificial Sequence: Synthetic oligonucleotide
auagccauggcaaaauucuu

SEQ ID NO: 671 - RNA, 20 nt, Artificial Sequence
  Description of Artificial Sequence: Synthetic oligonucleotide
agaaggcuaaaguauagcca

SEQ ID NO: 672 - RNA, 20 nt, Artificial Sequence
  Description of Artificial Sequence: Synthetic oligonucleotide
caguuuagaccaaucauaga

SEQ ID NO: 673 - RNA, 20 nt, Artificial Sequence
  Description of Artificial Sequence: Synthetic oligonucleotide
uauaacuaguugcaugguac

SEQ ID NO: 674 - RNA, 20 nt, Artificial Sequence
  Description of Artificial Sequence: Synthetic oligonucleotide
ugccaguaacucuggcaaua

SEQ ID NO: 675 - RNA, 20 nt, Artificial Sequence
  Description of Artificial Sequence: Synthetic oligonucleotide
uaagaaacugccaguaacuc

SEQ ID NO: 676 - RNA, 20 nt, Artificial Sequence
  Description of Artificial Sequence: Synthetic oligonucleotide
guccauauugccagaguuac

SEQ ID NO: 677 - RNA, 20 nt, Artificial Sequence
  Description of Artificial Sequence: Synthetic oligonucleotide
caaaauaaugaugaguauga

SEQ ID NO: 678 - RNA, 20 nt, Artificial Sequence
  Description of Artificial Sequence: Synthetic oligonucleotide
acuuuuagggucuucuaacu

SEQ ID NO: 679 - RNA, 20 nt, Artificial Sequence
  Description of Artificial Sequence: Synthetic oligonucleotide
ucuaacuaggcugaagcccg

SEQ ID NO: 680 - RNA, 20 nt, Artificial Sequence
  Description of Artificial Sequence: Synthetic oligonucleotide
cuaacuaggcugaagcccgu

SEQ ID NO: 681 - RNA, 20 nt, Artificial Sequence
  Description of Artificial Sequence: Synthetic oligonucleotide
gaucacacuuuacuagucug

SEQ ID NO: 682 - RNA, 20 nt, Artificial Sequence
  Description of Artificial Sequence: Synthetic oligonucleotide
acuucuaccacucucaaguc

SEQ ID NO: 683 - RNA, 20 nt, Artificial Sequence
  Description of Artificial Sequence: Synthetic oligonucleotide
uuacaauuaaccaccaaagc

SEQ ID NO: 684 - RNA, 20 nt, Artificial Sequence
  Description of Artificial Sequence: Synthetic oligonucleotide
ucacaucucgaguuauagau

SEQ ID NO: 685 - RNA, 20 nt, Artificial Sequence
  Description of Artificial Sequence: Synthetic oligonucleotide
uccuaaaacuuuuaugggau

SEQ ID NO: 686 - RNA, 20 nt, Artificial Sequence
  Description of Artificial Sequence: Synthetic oligonucleotide
uaagucauucaauuuauagg

SEQ ID NO: 687 - RNA, 20 nt, Artificial Sequence
  Description of Artificial Sequence: Synthetic oligonucleotide
aagagcccgucaucuauaga

SEQ ID NO: 688 - RNA, 20 nt, Artificial Sequence
  Description of Artificial Sequence: Synthetic oligonucleotide
gaagagcccgucaucuauag

SEQ ID NO: 689 - RNA, 20 nt, Artificial Sequence
  Description of Artificial Sequence: Synthetic oligonucleotide
gcagugcccucuauagauga

SEQ ID NO: 690 - RNA, 20 nt, Artificial Sequence
  Description of Artificial Sequence: Synthetic oligonucleotide
cagugcccucuauagaugac

SEQ ID NO: 691 - RNA, 20 nt, Artificial Sequence
  Description of Artificial Sequence: Synthetic oligonucleotide
aaauaagucugcauuuauca

SEQ ID NO: 692 - RNA, 20 nt, Artificial Sequence
  Description of Artificial Sequence: Synthetic oligonucleotide
aacuaccccguucaaauccu

SEQ ID NO: 693 - RNA, 20 nt, Artificial Sequence
  Description of Artificial Sequence: Synthetic oligonucleotide
gugagaguauaauacauaaa

SEQ ID NO: 694 - RNA, 20 nt, Artificial Sequence
  Description of Artificial Sequence: Synthetic oligonucleotide
uccagaauaaccugagaggg

SEQ ID NO: 695 - RNA, 20 nt, Artificial Sequence
  Description of Artificial Sequence: Synthetic oligonucleotide
uugcuccagaauaaccugag

SEQ ID NO: 696 - RNA, 20 nt, Artificial Sequence
  Description of Artificial Sequence: Synthetic oligonucleotide
aauuaccaauggggaugagg

SEQ ID NO: 697 - RNA, 20 nt, Artificial Sequence
  Description of Artificial Sequence: Synthetic oligonucleotide
gccacuacagaaaacuaugg

SEQ ID NO: 698 - RNA, 20 nt, Artificial Sequence
  Description of Artificial Sequence: Synthetic oligonucleotide
gcagccacuacagaaaacua

SEQ ID NO: 699 - RNA, 20 nt, Artificial Sequence
  Description of Artificial Sequence: Synthetic oligonucleotide
cugguuucuaucugauugaa

SEQ ID NO: 700 - RNA, 20 nt, Artificial Sequence
  Description of Artificial Sequence: Synthetic oligonucleotide
guuucuaucugauugaaagg

SEQ ID NO: 701 - RNA, 20 nt, Artificial Sequence
  Description of Artificial Sequence: Synthetic oligonucleotide
uucucaaucucuuuucuacc

SEQ ID NO: 702 - RNA, 20 nt, Artificial Sequence
  Description of Artificial Sequence: Synthetic oligonucleotide
cuguaugccuucauuuaucc

SEQ ID NO: 703 - RNA, 20 nt, Artificial Sequence
  Description of Artificial Sequence: Synthetic oligonucleotide
agauaaucacuuauauaccc

SEQ ID NO: 704 - RNA, 20 nt, Artificial Sequence
  Description of Artificial Sequence: Synthetic oligonucleotide
gcauauacaaccaaauacca

SEQ ID NO: 705 - RNA, 20 nt, Artificial Sequence
  Description of Artificial Sequence: Synthetic oligonucleotide
cacuuauauacccugguauu

SEQ ID NO: 706 - RNA, 20 nt, Artificial Sequence
  Description of Artificial Sequence: Synthetic oligonucleotide
agauugugcaacuccucccc

SEQ ID NO: 707 - RNA, 20 nt, Artificial Sequence
  Description of Artificial Sequence: Synthetic oligonucleotide
gcugugcuucagauaaacuu

SEQ ID NO: 708 - RNA, 20 nt, Artificial Sequence
  Description of Artificial Sequence: Synthetic oligonucleotide
gcagacuaauaugcucaacu

SEQ ID NO: 709 - RNA, 20 nt, Artificial Sequence
  Description of Artificial Sequence: Synthetic oligonucleotide
aggucuacuguagauucuua

SEQ ID NO: 710 - RNA, 20 nt, Artificial Sequence
  Description of Artificial Sequence: Synthetic oligonucleotide
uucgcauccacuggagguac

SEQ ID NO: 711 - RNA, 20 nt, Artificial Sequence
  Description of Artificial Sequence: Synthetic oligonucleotide
acugagguuuucgcauccac

SEQ ID NO: 712 - RNA, 20 nt, Artificial Sequence
  Description of Artificial Sequence: Synthetic oligonucleotide
uucaauuaccuagucaacua

SEQ ID NO: 713 - RNA, 20 nt, Artificial Sequence
  Description of Artificial Sequence: Synthetic oligonucleotide
guuauuacauucuaaaagua

SEQ ID NO: 714 - RNA, 20 nt, Artificial Sequence
  Description of Artificial Sequence: Synthetic oligonucleotide
gugugacuuuugguuugcug

SEQ ID NO: 715 - RNA, 20 nt, Artificial Sequence
  Description of Artificial Sequence: Synthetic oligonucleotide
uuguuguaucauuagccuuc

SEQ ID NO: 716 - RNA, 20 nt, Artificial Sequence
  Description of Artificial Sequence: Synthetic oligonucleotide
auauauuucgguuuuggggg

SEQ ID NO: 717 - RNA, 20 nt, Artificial Sequence
  Description of Artificial Sequence: Synthetic oligonucleotide
aauauauuucgguuuugggg

SEQ ID NO: 718 - RNA, 20 nt, Artificial Sequence
  Description of Artificial Sequence: Synthetic oligonucleotide
uaauauauuucgguuuuggg

SEQ ID NO: 719 - RNA, 20 nt, Artificial Sequence
  Description of Artificial Sequence: Synthetic oligonucleotide
cucaugaucaguuauuuugu

SEQ ID NO: 720 - RNA, 20 nt, Artificial Sequence
  Description of Artificial Sequence: Synthetic oligonucleotide
gaucaugaggcaugugaauu

SEQ ID NO: 721 - RNA, 20 nt, Artificial Sequence
  Description of Artificial Sequence: Synthetic oligonucleotide
ggaucuuuuugugcacucac

SEQ ID NO: 722 - RNA, 20 nt, Artificial Sequence
  Description of Artificial Sequence: Synthetic oligonucleotide
cagacacauugcauauuucu

SEQ ID NO: 723 - RNA, 20 nt, Artificial Sequence
  Description of Artificial Sequence: Synthetic oligonucleotide
uccuauaauugacugauauc

SEQ ID NO: 724 - RNA, 20 nt, Artificial Sequence
  Description of Artificial Sequence: Synthetic oligonucleotide
gguaguagucaaccuaauga

SEQ ID NO: 725 - RNA, 20 nt, Artificial Sequence
  Description of Artificial Sequence: Synthetic oligonucleotide
ucuguaagagcauuugucaa

SEQ ID NO: 726 - RNA, 20 nt, Artificial Sequence
  Description of Artificial Sequence: Synthetic oligonucleotide
uacauguaguucccuugguc

SEQ ID NO: 727 - RNA, 20 nt, Artificial Sequence
  Description of Artificial Sequence: Synthetic oligonucleotide
cucuguacauguaguucccu

SEQ ID NO: 728 - RNA, 20 nt, Artificial Sequence
  Description of Artificial Sequence: Synthetic oligonucleotide
agcugagcagcucacgugau

SEQ ID NO: 729 - RNA, 20 nt, Artificial Sequence
  Description of Artificial Sequence: Synthetic oligonucleotide
uggguaacgggccaacuuca

SEQ ID NO: 730 - RNA, 20 nt, Artificial Sequence
  Description of Artificial Sequence: Synthetic oligonucleotide
aguguuccauuuugagccau

SEQ ID NO: 731 - RNA, 20 nt, Artificial Sequence
  Description of Artificial Sequence: Synthetic oligonucleotide
cuuucucaauguacucauau

SEQ ID NO: 732 - RNA, 20 nt, Artificial Sequence
  Description of Artificial Sequence: Synthetic oligonucleotide
guuauagucugaaguagagg

SEQ ID NO: 733 - RNA, 20 nt, Artificial Sequence
  Description of Artificial Sequence: Synthetic oligonucleotide
gagguuauagucugaaguag

SEQ ID NO: 734 - RNA, 20 nt, Artificial Sequence
  Description of Artificial Sequence: Synthetic oligonucleotide
agacccuauauuuccaagug

SEQ ID NO: 735 - RNA, 20 nt, Artificial Sequence
  Description of Artificial Sequence: Synthetic oligonucleotide
uccaagacaaaaguacagua

SEQ ID NO: 736 - RNA, 20 nt, Artificial Sequence
  Description of Artificial Sequence: Synthetic oligonucleotide
gauaacagaaaaagcuauac

SEQ ID NO: 737 - RNA, 20 nt, Artificial Sequence
  Description of Artificial Sequence: Synthetic oligonucleotide
acccuuguuaaguaugggga

SEQ ID NO: 738 - RNA, 20 nt, Artificial Sequence
  Description of Artificial Sequence: Synthetic oligonucleotide
uguuacccuuguuaaguaug

SEQ ID NO: 739 - RNA, 20 nt, Artificial Sequence
  Description of Artificial Sequence: Synthetic oligonucleotide
cuguuacccuuguuaaguau

SEQ ID NO: 740 - RNA, 20 nt, Artificial Sequence
  Description of Artificial Sequence: Synthetic oligonucleotide
ucuguuacccuuguuaagua

SEQ ID NO: 741 - RNA, 20 nt, Artificial Sequence
  Description of Artificial Sequence: Synthetic oligonucleotide
cuccuuccccauacuuaaca

SEQ ID NO: 742 - RNA, 20 nt, Artificial Sequence
  Description of Artificial Sequence: Synthetic oligonucleotide
uccuuccccauacuuaacaa

SEQ ID NO: 743 - RNA, 20 nt, Artificial Sequence
  Description of Artificial Sequence: Synthetic oligonucleotide
agauuguuaugaaacguucc

SEQ ID NO: 744 - RNA, 20 nt, Artificial Sequence
  Description of Artificial Sequence: Synthetic oligonucleotide
uuaugucuucuaaggaaaug

SEQ ID NO: 745 - RNA, 20 nt, Artificial Sequence
  Description of Artificial Sequence: Synthetic oligonucleotide
augucuucuaaggaaaugug

SEQ ID NO: 746 - RNA, 20 nt, Artificial Sequence
  Description of Artificial Sequence: Synthetic oligonucleotide
agcaacagaaaaagcuauac

SEQ ID NO: 747 - RNA, 20 nt, Artificial Sequence
  Description of Artificial Sequence: Synthetic oligonucleotide
guugcuucagugugguauuu

SEQ ID NO: 748 - RNA, 20 nt, Artificial Sequence
  Description of Artificial Sequence: Synthetic oligonucleotide
aagaauuuguuaccacuugg

SEQ ID NO: 749 - RNA, 20 nt, Artificial Sequence
  Description of Artificial Sequence: Synthetic oligonucleotide
agccacauagugccaccaag

SEQ ID NO: 750 - RNA, 20 nt, Artificial Sequence
  Description of Artificial Sequence: Synthetic oligonucleotide
gcaauuaacuauacuguucu

SEQ ID NO: 751 - RNA, 20 nt, Artificial Sequence
  Description of Artificial Sequence: Synthetic oligonucleotide
cuacccaacaaacuaagccu

SEQ ID NO: 752 - RNA, 20 nt, Artificial Sequence
  Description of Artificial Sequence: Synthetic oligonucleotide
uaaaccaaggcuuaguuugu

SEQ ID NO: 753 - RNA, 20 nt, Artificial Sequence
  Description of Artificial Sequence: Synthetic oligonucleotide
caaggcuuaguuuguugggu

SEQ ID NO: 754 - RNA, 20 nt, Artificial Sequence
  Description of Artificial Sequence: Synthetic oligonucleotide
aaggcuuaguuuguugggua

SEQ ID NO: 755 - RNA, 20 nt, Artificial Sequence
  Description of Artificial Sequence: Synthetic oligonucleotide
auaaaugacaccugaccuaa

SEQ ID NO: 756 - RNA, 20 nt, Artificial Sequence
  Description of Artificial Sequence: Synthetic oligonucleotide
auagaaaccuccuuuagguc

SEQ ID NO: 757 - RNA, 20 nt, Artificial Sequence
  Description of Artificial Sequence: Synthetic oligonucleotide
cucacauuuagacaaagaag

SEQ ID NO: 758 - RNA, 20 nt, Artificial Sequence
  Description of Artificial Sequence: Synthetic oligonucleotide
ucucacauuuagacaaagaa

SEQ ID NO: 759 - RNA, 20 nt, Artificial Sequence
  Description of Artificial Sequence: Synthetic oligonucleotide
gguauuagaugucaagugcu

SEQ ID NO: 760 - RNA, 20 nt, Artificial Sequence
  Description of Artificial Sequence: Synthetic oligonucleotide
cacaaauaccuuaacaauua

SEQ ID NO: 761 - RNA, 20 nt, Artificial Sequence
  Description of Artificial Sequence: Synthetic oligonucleotide
uucucgaucuguggugguca

SEQ ID NO: 762 - RNA, 20 nt, Artificial Sequence
  Description of Artificial Sequence: Synthetic oligonucleotide
acaauuugucauguuacugu

SEQ ID NO: 763 - RNA, 20 nt, Artificial Sequence
  Description of Artificial Sequence: Synthetic oligonucleotide
uauucaauuccauuuggauc

SEQ ID NO: 764 - RNA, 20 nt, Artificial Sequence
  Description of Artificial Sequence: Synthetic oligonucleotide
caaccaguacauuuaugaaa

SEQ ID NO: 765 - RNA, 20 nt, Artificial Sequence
  Description of Artificial Sequence: Synthetic oligonucleotide
acaaccaguacauuuaugaa

SEQ ID NO: 766 - RNA, 20 nt, Artificial Sequence
  Description of Artificial Sequence: Synthetic oligonucleotide
gagaagagacguugcaaaaa

SEQ ID NO: 767 - RNA, 20 nt, Artificial Sequence
  Description of Artificial Sequence: Synthetic oligonucleotide
uuuguuaagguggugaggau

SEQ ID NO: 768 - RNA, 20 nt, Artificial Sequence
  Description of Artificial Sequence: Synthetic oligonucleotide
aaaaguacagaaacuccaau

SEQ ID NO: 769 - RNA, 20 nt, Artificial Sequence
  Description of Artificial Sequence: Synthetic oligonucleotide
aaaugucccacccagauggu

SEQ ID NO: 770 - RNA, 20 nt, Artificial Sequence
  Description of Artificial Sequence: Synthetic oligonucleotide
ugccaaaugucccacccaga

SEQ ID NO: 771 - RNA, 20 nt, Artificial Sequence
  Description of Artificial Sequence: Synthetic oligonucleotide
cucacccacuagugacaccc

SEQ ID NO: 772 - RNA, 20 nt, Artificial Sequence
  Description of Artificial Sequence: Synthetic oligonucleotide
aagaacaagguaggccuuag

SEQ ID NO: 773 - RNA, 20 nt, Artificial Sequence
  Description of Artificial Sequence: Synthetic oligonucleotide
gacugaaauucuuucuucuc

SEQ ID NO: 774 - RNA, 20 nt, Artificial Sequence
  Description of Artificial Sequence: Synthetic oligonucleotide
ucaacuggaaucaauacacu

SEQ ID NO: 775 - RNA, 20 nt, Artificial Sequence
  Description of Artificial Sequence: Synthetic oligonucleotide
caucccuaagaccuuauuag

SEQ ID NO: 776 - RNA, 20 nt, Artificial Sequence
  Description of Artificial Sequence: Synthetic oligonucleotide
gugugaguuguggggcccag

SEQ ID NO: 777 - RNA, 20 nt, Artificial Sequence
  Description of Artificial Sequence: Synthetic oligonucleotide
guuugauuaaauuaggucaa

SEQ ID NO: 778 - RNA, 20 nt, Artificial Sequence
  Description of Artificial Sequence: Synthetic oligonucleotide
aguuugauuaaauuagguca

SEQ ID NO: 779 - RNA, 20 nt, Artificial Sequence
  Description of Artificial Sequence: Synthetic oligonucleotide
auuaacaguuugauuaaauu

SEQ ID NO: 780 - RNA, 20 nt, Artificial Sequence
  Description of Artificial Sequence: Synthetic oligonucleotide
aguaagggguacaguaugga

SEQ ID NO: 781 - RNA, 20 nt, Artificial Sequence
  Description of Artificial Sequence: Synthetic oligonucleotide
guggcaaauaaguugaguaa

SEQ ID NO: 782 - RNA, 20 nt, Artificial Sequence
  Description of Artificial Sequence: Synthetic oligonucleotide
aguggcaaauaaguugagua

SEQ ID NO: 783 - RNA, 20 nt, Artificial Sequence
  Description of Artificial Sequence: Synthetic oligonucleotide
caugguggcuaaaauauaua

SEQ ID NO: 784 - RNA, 20 nt, Artificial Sequence
  Description of Artificial Sequence: Synthetic oligonucleotide
acgaugaugacguuucaugg

SEQ ID NO: 785 - RNA, 20 nt, Artificial Sequence
  Description of Artificial Sequence: Synthetic oligonucleotide
aaaacgaugaugacguuuca

SEQ ID NO: 786 - RNA, 20 nt, Artificial Sequence
  Description of Artificial Sequence: Synthetic oligonucleotide
cacuacagaccuacacuaaa

SEQ ID NO: 787 - RNA, 20 nt, Artificial Sequence
  Description of Artificial Sequence: Synthetic oligonucleotide
caagaaucauccaaaaguga

SEQ ID NO: 788 - RNA, 20 nt, Artificial Sequence
  Description of Artificial Sequence: Synthetic oligonucleotide
acaagaaucauccaaaagug

SEQ ID NO: 789 - RNA, 20 nt, Artificial Sequence
  Description of Artificial Sequence: Synthetic oligonucleotide
aauuucucaacagaaacaga

SEQ ID NO: 790 - RNA, 20 nt, Artificial Sequence
  Description of Artificial Sequence: Synthetic oligonucleotide
guccugacgacacccaaucu

SEQ ID NO: 791 - RNA, 20 nt, Artificial Sequence
  Description of Artificial Sequence: Synthetic oligonucleotide
guacacucuauggauaaaga

SEQ ID NO: 792 - RNA, 20 nt, Artificial Sequence
  Description of Artificial Sequence: Synthetic oligonucleotide
gucuucaaauguacacucua

SEQ ID NO: 793 - RNA, 20 nt, Artificial Sequence
  Description of Artificial Sequence: Synthetic oligonucleotide
gugucugacugacagcaaua

SEQ ID NO: 794 - RNA, 20 nt, Artificial Sequence
  Description of Artificial Sequence: Synthetic oligonucleotide
agcugcaaaaguuaugaacg

SEQ ID NO: 795 - RNA, 20 nt, Artificial Sequence
  Description of Artificial Sequence: Synthetic oligonucleotide
uacucgcugaauugguaaga

SEQ ID NO: 796 - RNA, 20 nt, Artificial Sequence
  Description of Artificial Sequence: Synthetic oligonucleotide
gccguuuccuuuacauaaaa

SEQ ID NO: 797 - RNA, 20 nt, Artificial Sequence
  Description of Artificial Sequence: Synthetic oligonucleotide
cuugcaccaucccacucaga

SEQ ID NO: 798 - RNA, 20 nt, Artificial Sequence
  Description of Artificial Sequence: Synthetic oligonucleotide
ucuugcaccaucccacucag

SEQ ID NO: 799 - RNA, 20 nt, Artificial Sequence
  Description of Artificial Sequence: Synthetic oligonucleotide
gguuuuaaauugcuauucua

SEQ ID NO: 800 - RNA, 20 nt, Artificial Sequence
  Description of Artificial Sequence: Synthetic oligonucleotide
gaauacgcaguguuuuuaug

SEQ ID NO: 801 - RNA, 20 nt, Artificial Sequence
  Description of Artificial Sequence: Synthetic oligonucleotide
ugaauacgcaguguuuuuau

SEQ ID NO: 802 - RNA, 20 nt, Artificial Sequence
  Description of Artificial Sequence: Synthetic oligonucleotide
augaauacgcaguguuuuua

SEQ ID NO: 803 - RNA, 20 nt, Artificial Sequence
  Description of Artificial Sequence: Synthetic oligonucleotide
cuuuaccaggugauggaagg

SEQ ID NO: 804 - RNA, 20 nt, Artificial Sequence
  Description of Artificial Sequence: Synthetic oligonucleotide
acuuuaccaggugauggaag

SEQ ID NO: 805 - RNA, 20 nt, Artificial Sequence
  Description of Artificial Sequence: Synthetic oligonucleotide
uacuuuaccaggugauggaa

SEQ ID NO: 806 - RNA, 20 nt, Artificial Sequence
  Description of Artificial Sequence: Synthetic oligonucleotide
caaugccuagauauacaucc

SEQ ID NO: 807 - RNA, 20 nt, Artificial Sequence
  Description of Artificial Sequence: Synthetic oligonucleotide
auaaguauggauaauaaguu

SEQ ID NO: 808 - RNA, 20 nt, Artificial Sequence
  Description of Artificial Sequence: Synthetic oligonucleotide
gauccucaugacucuugauu

SEQ ID NO: 809 - RNA, 20 nt, Artificial Sequence
  Description of Artificial Sequence: Synthetic oligonucleotide
uuggaagccugucucacacc

SEQ ID NO: 810 - RNA, 20 nt, Artificial Sequence
  Description of Artificial Sequence: Synthetic oligonucleotide
ucaauguggcaguagaagca

SEQ ID NO: 811 - RNA, 20 nt, Artificial Sequence
  Description of Artificial Sequence: Synthetic oligonucleotide
aucaauguggcaguagaagc

SEQ ID NO: 812 - RNA, 20 nt, Artificial Sequence
  Description of Artificial Sequence: Synthetic oligonucleotide
acauugcuagaaaaacuuaa

SEQ ID NO: 813 - RNA, 20 nt, Artificial Sequence
  Description of Artificial Sequence: Synthetic oligonucleotide
guguaaccucaugaccagcc

SEQ ID NO: 814 - RNA, 20 nt, Artificial Sequence
  Description of Artificial Sequence: Synthetic oligonucleotide
uggaaaaauccaggacuaug

SEQ ID NO: 815 - RNA, 20 nt, Artificial Sequence
  Description of Artificial Sequence: Synthetic oligonucleotide
aacagaauacuaugaauaac

SEQ ID NO: 816 - RNA, 20 nt, Artificial Sequence
  Description of Artificial Sequence: Synthetic oligonucleotide
aagcugagauaaacuuacac

SEQ ID NO: 817 - RNA, 20 nt, Artificial Sequence
  Description of Artificial Sequence: Synthetic oligonucleotide
ucaguucacuaucuuggauu

SEQ ID NO: 818 - RNA, 20 nt, Artificial Sequence
  Description of Artificial Sequence: Synthetic oligonucleotide
uccucacuaagcuuaauucu

SEQ ID NO: 819 - RNA, 20 nt, Artificial Sequence
  Description of Artificial Sequence: Synthetic oligonucleotide
ugagcuuuuauguuauaaca

SEQ ID NO: 820 - RNA, 20 nt, Artificial Sequence
  Description of Artificial Sequence: Synthetic oligonucleotide
uugucagagcuagaucuccu

SEQ ID NO: 821 - RNA, 20 nt, Artificial Sequence
  Description of Artificial Sequence: Synthetic oligonucleotide
caggcuucaguuuugaagcc

SEQ ID NO: 822 - RNA, 20 nt, Artificial Sequence
  Description of Artificial Sequence: Synthetic oligonucleotide
uucauaaaccaugcuguaac

SEQ ID NO: 823 - RNA, 20 nt, Artificial Sequence
  Description of Artificial Sequence: Synthetic oligonucleotide
ucaaugagcauauuucgaaa

SEQ ID NO: 824 - RNA, 20 nt, Artificial Sequence
  Description of Artificial Sequence: Synthetic oligonucleotide
cuuaauauugacaaucagag

SEQ ID NO: 825 - RNA, 20 nt, Artificial Sequence
  Description of Artificial Sequence: Synthetic oligonucleotide
uaaaguauucuauuguagcu

SEQ ID NO: 826 - RNA, 20 nt, Artificial Sequence
  Description of Artificial Sequence: Synthetic oligonucleotide
uuaaaguauucuauuguagc

SEQ ID NO: 827 - RNA, 20 nt, Artificial Sequence
  Description of Artificial Sequence: Synthetic oligonucleotide
gcuauuaugucuaaaaagca

SEQ ID NO: 828 - RNA, 20 nt, Artificial Sequence
  Description of Artificial Sequence: Synthetic oligonucleotide
cauggagaggggaacacacu

SEQ ID NO: 829 - RNA, 20 nt, Artificial Sequence
  Description of Artificial Sequence: Synthetic oligonucleotide
uacauuuaacagacauggag

SEQ ID NO: 830 - RNA, 20 nt, Artificial Sequence
  Description of Artificial Sequence: Synthetic oligonucleotide
gauagcaugagauuagcucu

SEQ ID NO: 831 - RNA, 20 nt, Artificial Sequence
  Description of Artificial Sequence: Synthetic oligonucleotide
gagauuagcucuuggacauc

SEQ ID NO: 832 - RNA, 20 nt, Artificial Sequence
  Description of Artificial Sequence: Synthetic oligonucleotide
aagagacaacaauuagacug

SEQ ID NO: 833 - RNA, 20 nt, Artificial Sequence
  Description of Artificial Sequence: Synthetic oligonucleotide
cacaucaagccaaagcuucu

SEQ ID NO: 834 - RNA, 20 nt, Artificial Sequence
  Description of Artificial Sequence: Synthetic oligonucleotide
acacaucaagccaaagcuuc

SEQ ID NO: 835 - RNA, 20 nt, Artificial Sequence
  Description of Artificial Sequence: Synthetic oligonucleotide
caucuaguuggaaucccgga

SEQ ID NO: 836 - RNA, 20 nt, Artificial Sequence
  Description of Artificial Sequence: Synthetic oligonucleotide
cauacauuccaacaucuagu

SEQ ID NO: 837 - RNA, 20 nt, Artificial Sequence
  Description of Artificial Sequence: Synthetic oligonucleotide
aaaguauauugaaugaagca

SEQ ID NO: 838 - RNA, 20 nt, Artificial Sequence
  Description of Artificial Sequence: Synthetic oligonucleotide
uacauaguggccagagcaua

SEQ ID NO: 839 - RNA, 20 nt, Artificial Sequence
  Description of Artificial Sequence: Synthetic oligonucleotide
uucuguuggaagcuucucag

SEQ ID NO: 840 - RNA, 20 nt, Artificial Sequence
  Description of Artificial Sequence: Synthetic oligonucleotide
gagaggucuauacaacaacu

SEQ ID NO: 841 - RNA, 20 nt, Artificial Sequence
  Description of Artificial Sequence: Synthetic oligonucleotide
cugaucaaacauauagggag

SEQ ID NO: 842 - RNA, 20 nt, Artificial Sequence
  Description of Artificial Sequence: Synthetic oligonucleotide
cuugguuuagcuguaaagac

SEQ ID NO: 843 - RNA, 20 nt, Artificial Sequence
  Description of Artificial Sequence: Synthetic oligonucleotide
gaagccauuuuuacugacaa

SEQ ID NO: 844 - RNA, 20 nt, Artificial Sequence
  Description of Artificial Sequence: Synthetic oligonucleotide
uaauucuaagacugggaguc

SEQ ID NO: 845 - RNA, 20 nt, Artificial Sequence
  Description of Artificial Sequence: Synthetic oligonucleotide
uuaaucaaaaaacagcucaa

SEQ ID NO: 846 - RNA, 20 nt, Artificial Sequence
  Description of Artificial Sequence: Synthetic oligonucleotide
guuaaucaaaaaacagcuca

SEQ ID NO: 847 - RNA, 20 nt, Artificial Sequence
  Description of Artificial Sequence: Synthetic oligonucleotide
cacauaauaggaaaauuuga

SEQ ID NO: 848 - RNA, 20 nt, Artificial Sequence
  Description of Artificial Sequence: Synthetic oligonucleotide
aauggccuucugucugccua

SEQ ID NO: 849 - RNA, 20 nt, Artificial Sequence
  Description of Artificial Sequence: Synthetic oligonucleotide
cuugcuaacugaauaccuca

SEQ ID NO: 850 - RNA, 20 nt, Artificial Sequence
  Description of Artificial Sequence: Synthetic oligonucleotide
ccucuaauacuaaguuucac

SEQ ID NO: 851 - RNA, 20 nt, Artificial Sequence
  Description of Artificial Sequence: Synthetic oligonucleotide
auauguucucuacuagcgua

SEQ ID NO: 852 - RNA, 20 nt, Artificial Sequence
  Description of Artificial Sequence: Synthetic oligonucleotide
acuaaucugguauuaguaca

SEQ ID NO: 853 - RNA, 20 nt, Artificial Sequence
  Description of Artificial Sequence: Synthetic oligonucleotide
cugcuauacccagauccacu

SEQ ID NO: 854 - RNA, 20 nt, Artificial Sequence
  Description of Artificial Sequence: Synthetic oligonucleotide
cucaucuauaucaguuguuc

SEQ ID NO: 855 - RNA, 20 nt, Artificial Sequence
  Description of Artificial Sequence: Synthetic oligonucleotide
acuaagguugaucugaacag

SEQ ID NO: 856 - RNA, 20 nt, Artificial Sequence
  Description of Artificial Sequence: Synthetic oligonucleotide
gcuuuaaacgauucucccaa

SEQ ID NO: 857 - RNA, 20 nt, Artificial Sequence
  Description of Artificial Sequence: Synthetic oligonucleotide
agagauauucaugaaucucu

SEQ ID NO: 858 - RNA, 20 nt, Artificial Sequence
  Description of Artificial Sequence: Synthetic oligonucleotide
aggauauuaaguacuaggcc

SEQ ID NO: 859 - RNA, 20 nt, Artificial Sequence
  Description of Artificial Sequence: Synthetic oligonucleotide
accugaggauauuaaguacu

SEQ ID NO: 860 - RNA, 20 nt, Artificial Sequence
  Description of Artificial Sequence: Synthetic oligonucleotide
gccuaguacuuaauauccuc

SEQ ID NO: 861 - RNA, 20 nt, Artificial Sequence
  Description of Artificial Sequence: Synthetic oligonucleotide
auacuaguuuacagaaccug

SEQ ID NO: 862 - RNA, 20 nt, Artificial Sequence
  Description of Artificial Sequence: Synthetic oligonucleotide
cacaaucugcuuuugggagg

SEQ ID NO: 863 - RNA, 20 nt, Artificial Sequence
  Description of Artificial Sequence: Synthetic oligonucleotide
aaaaaauagcgcuggggccg

SEQ ID NO: 864 - RNA, 20 nt, Artificial Sequence
  Description of Artificial Sequence: Synthetic oligonucleotide
gauucaaaaaaauagcgcug

SEQ ID NO: 865 - RNA, 20 nt, Artificial Sequence
  Description of Artificial Sequence: Synthetic oligonucleotide
ugauucaaaaaaauagcgcu

SEQ ID NO: 866 - RNA, 20 nt, Artificial Sequence
  Description of Artificial Sequence: Synthetic oligonucleotide
uugauucaaaaaaauagcgc

SEQ ID NO: 867 - RNA, 20 nt, Artificial Sequence
  Description of Artificial Sequence: Synthetic oligonucleotide
gauucaggaacgguguuugg

SEQ ID NO: 868 - RNA, 20 nt, Artificial Sequence
  Description of Artificial Sequence: Synthetic oligonucleotide
cauucuccuuagccacauac

SEQ ID NO: 869 - RNA, 20 nt, Artificial Sequence
  Description of Artificial Sequence: Synthetic oligonucleotide
auucuccuuagccacauacu

SEQ ID NO: 870 - RNA, 20 nt, Artificial Sequence
  Description of Artificial Sequence: Synthetic oligonucleotide
gcaauaggauucccaguaug

SEQ ID NO: 871 - RNA, 20 nt, Artificial Sequence
  Description of Artificial Sequence: Synthetic oligonucleotide
auuugcguguuuuuagcaau

SEQ ID NO: 872 - RNA, 20 nt, Artificial Sequence
  Description of Artificial Sequence: Synthetic oligonucleotide
guaaaggucuggagcaucau

SEQ ID NO: 873 - RNA, 20 nt, Artificial Sequence
  Description of Artificial Sequence: Synthetic oligonucleotide
uauuacaagaaauauauuga

SEQ ID NO: 874 - RNA, 20 nt, Artificial Sequence
  Description of Artificial Sequence: Synthetic oligonucleotide
uucuacaaguaucuuaauuu

SEQ ID NO: 875 - RNA, 20 nt, Artificial Sequence
  Description of Artificial Sequence: Synthetic oligonucleotide
aguuugaauguauauaauac

SEQ ID NO: 876 - RNA, 20 nt, Artificial Sequence
  Description of Artificial Sequence: Synthetic oligonucleotide
caauuuaaucuauugaagga

SEQ ID NO: 877 - RNA, 20 nt, Artificial Sequence
  Description of Artificial Sequence: Synthetic oligonucleotide
ucagugaaauaauucaaucc

SEQ ID NO: 878 - RNA, 20 nt, Artificial Sequence
  Description of Artificial Sequence: Synthetic oligonucleotide
acuugaauaauaugacaucc

SEQ ID NO: 879 - RNA, 20 nt, Artificial Sequence
  Description of Artificial Sequence: Synthetic oligonucleotide
uucguuauguuccaagcauc

SEQ ID NO: 880 - RNA, 20 nt, Artificial Sequence
  Description of Artificial Sequence: Synthetic oligonucleotide
aagcaucaggcuagacaugc

SEQ ID NO: 881 - RNA, 20 nt, Artificial Sequence
  Description of Artificial Sequence: Synthetic oligonucleotide
caugcugguaaggguucugu

SEQ ID NO: 882 - RNA, 20 nt, Artificial Sequence
  Description of Artificial Sequence: Synthetic oligonucleotide
cccgcacuugacaccaucua

SEQ ID NO: 883 - RNA, 20 nt, Artificial Sequence
  Description of Artificial Sequence: Synthetic oligonucleotide
uccgcauuaacaaucuguua

SEQ ID NO: 884 - RNA, 20 nt, Artificial Sequence
  Description of Artificial Sequence: Synthetic oligonucleotide
ugcaaacaugguggcuuuaa

SEQ ID NO: 885 - RNA, 20 nt, Artificial Sequence
  Description of Artificial Sequence: Synthetic oligonucleotide
cccaaccauguauauuccac

SEQ ID NO: 886 - RNA, 20 nt, Artificial Sequence
  Description of Artificial Sequence: Synthetic oligonucleotide
uccuguggaauauacauggu

SEQ ID NO: 887 - RNA, 20 nt, Artificial Sequence
  Description of Artificial Sequence: Synthetic oligonucleotide
cuguggaauauacaugguug

SEQ ID NO: 888 - RNA, 20 nt, Artificial Sequence
  Description of Artificial Sequence: Synthetic oligonucleotide
aucauugucauuguaaguca

SEQ ID NO: 889 - RNA, 20 nt, Artificial Sequence
  Description of Artificial Sequence: Synthetic oligonucleotide
auaaacagcagacccaucau

SEQ ID NO: 890 - RNA, 20 nt, Artificial Sequence
  Description of Artificial Sequence: Synthetic oligonucleotide
gguauucuuuaaccuaugau

SEQ ID NO: 891 - RNA, 20 nt, Artificial Sequence
  Description of Artificial Sequence: Synthetic oligonucleotide
ugguauucuuuaaccuauga

SEQ ID NO: 892 - RNA, 20 nt, Artificial Sequence
  Description of Artificial Sequence: Synthetic oligonucleotide
ggcauaauacuuucugugga

SEQ ID NO: 893 - RNA, 20 nt, Artificial Sequence
  Description of Artificial Sequence: Synthetic oligonucleotide
caaaguugacacacugcccc

SEQ ID NO: 894 - RNA, 20 nt, Artificial Sequence
  Description of Artificial Sequence: Synthetic oligonucleotide
augucaaucccauacuccag

SEQ ID NO: 895 - RNA, 20 nt, Artificial Sequence
  Description of Artificial Sequence: Synthetic oligonucleotide
gacacacugccccuggagua

SEQ ID NO: 896 - RNA, 20 nt, Artificial Sequence
  Description of Artificial Sequence: Synthetic oligonucleotide
acacacugccccuggaguau

SEQ ID NO: 897 - RNA, 20 nt, Artificial Sequence
  Description of Artificial Sequence: Synthetic oligonucleotide
aguaugggauugacauacuu

SEQ ID NO: 898 - RNA, 20 nt, Artificial Sequence
  Description of Artificial Sequence: Synthetic oligonucleotide
ugaccacauuuguguaacau

SEQ ID NO: 899 - RNA, 20 nt, Artificial Sequence
  Description of Artificial Sequence: Synthetic oligonucleotide
ugacccauguuacacaaaug

SEQ ID NO: 900 - RNA, 20 nt, Artificial Sequence
  Description of Artificial Sequence: Synthetic oligonucleotide
guaauagacauauaugcacg

SEQ ID NO: 901 - RNA, 20 nt, Artificial Sequence
  Description of Artificial Sequence: Synthetic oligonucleotide
caguugcagaauucuucauu

SEQ ID NO: 902 - RNA, 20 nt, Artificial Sequence
  Description of Artificial Sequence: Synthetic oligonucleotide
gcagguaacuguguggauga

SEQ ID NO: 903 - RNA, 20 nt, Artificial Sequence
  Description of Artificial Sequence: Synthetic oligonucleotide
cccaugugguaaacggaagc

SEQ ID NO: 904 - RNA, 20 nt, Artificial Sequence
  Description of Artificial Sequence: Synthetic oligonucleotide
agaagcucccaugugguaaa

SEQ ID NO: 905 - RNA, 20 nt, Artificial Sequence
  Description of Artificial Sequence: Synthetic oligonucleotide
accugcuuccguuuaccaca

SEQ ID NO: 906 - RNA, 20 nt, Artificial Sequence
  Description of Artificial Sequence: Synthetic oligonucleotide
ccugcuuccguuuaccacau

SEQ ID NO: 907 - RNA, 20 nt, Artificial Sequence
  Description of Artificial Sequence: Synthetic oligonucleotide
caucuaaagaagcucccaug

SEQ ID NO: 908 - RNA, 20 nt, Artificial Sequence
  Description of Artificial Sequence: Synthetic oligonucleotide
guuauuagguguuuaugguc

SEQ ID NO: 909 - RNA, 20 nt, Artificial Sequence
  Description of Artificial Sequence: Synthetic oligonucleotide
aaggcagauguuacaaaguc

SEQ ID NO: 910 - RNA, 20 nt, Artificial Sequence
  Description of Artificial Sequence: Synthetic oligonucleotide
auccucacuuguuaacagga

SEQ ID NO: 911 - RNA, 20 nt, Artificial Sequence
  Description of Artificial Sequence: Synthetic oligonucleotide
uaccauccucacuuguuaac

SEQ ID NO: 912 - RNA, 20 nt, Artificial Sequence
  Description of Artificial Sequence: Synthetic oligonucleotide
ugccuuccuguuaacaagug

SEQ ID NO: 913 - RNA, 20 nt, Artificial Sequence
  Description of Artificial Sequence: Synthetic oligonucleotide
uaacaagugaggaugguaca

SEQ ID NO: 914 - RNA, 20 nt, Artificial Sequence
  Description of Artificial Sequence: Synthetic oligonucleotide
ucaggaacaagcuguucaac

SEQ ID NO: 915 - RNA, 20 nt, Artificial Sequence
  Description of Artificial Sequence: Synthetic oligonucleotide
ucaugauacaguuagcucug

SEQ ID NO: 916 - RNA, 20 nt, Artificial Sequence
  Description of Artificial Sequence: Synthetic oligonucleotide
uuagcucuguggcagugugu

SEQ ID NO: 917 - RNA, 20 nt, Artificial Sequence
  Description of Artificial Sequence: Synthetic oligonucleotide
acagaucauaaguuaacuaa

SEQ ID NO: 918 - RNA, 20 nt, Artificial Sequence
  Description of Artificial Sequence: Synthetic oligonucleotide
uuuuaaagucagucucaugc

SEQ ID NO: 919 - RNA, 20 nt, Artificial Sequence
  Description of Artificial Sequence: Synthetic oligonucleotide
auccagguaauaacuuauuc

SEQ ID NO: 920 - RNA, 20 nt, Artificial Sequence
  Description of Artificial Sequence: Synthetic oligonucleotide
auccagaauaaguuauuacc

SEQ ID NO: 921 - RNA, 20 nt, Artificial Sequence
  Description of Artificial Sequence: Synthetic oligonucleotide
gaagacagaauguaucaucc

SEQ ID NO: 922 - RNA, 20 nt, Artificial Sequence
  Description of Artificial Sequence: Synthetic oligonucleotide
gugugcacuaggugagauuu

SEQ ID NO: 923 - RNA, 20 nt, Artificial Sequence
  Description of Artificial Sequence: Synthetic oligonucleotide
acauuguguaugguauauau

SEQ ID NO: 924 - RNA, 20 nt, Artificial Sequence
  Description of Artificial Sequence: Synthetic oligonucleotide
aguuaguaauguaugagauu

SEQ ID NO: 925 - RNA, 20 nt, Artificial Sequence
  Description of Artificial Sequence: Synthetic oligonucleotide
caguuaguaauguaugagau

SEQ ID NO: 926 - RNA, 20 nt, Artificial Sequence
  Description of Artificial Sequence: Synthetic oligonucleotide
gaaguugucauguguucaca

SEQ ID NO: 927 - RNA, 20 nt, Artificial Sequence
  Description of Artificial Sequence: Synthetic oligonucleotide
aauuauaguuaggaucuguc

SEQ ID NO: 928 - RNA, 20 nt, Artificial Sequence
  Description of Artificial Sequence: Synthetic oligonucleotide
ccacuagcugaauuauaguu

SEQ ID NO: 929 - RNA, 20 nt, Artificial Sequence
  Description of Artificial Sequence: Synthetic oligonucleotide
uaaugaacuaauauacaaug

SEQ ID NO: 930 - RNA, 20 nt, Artificial Sequence
  Description of Artificial Sequence: Synthetic oligonucleotide
aauuauucgugaacagaaag

SEQ ID NO: 931 - RNA, 20 nt, Artificial Sequence
  Description of Artificial Sequence: Synthetic oligonucleotide
ucccucugagcaagcuuccu

SEQ ID NO: 932 - RNA, 20 nt, Artificial Sequence
  Description of Artificial Sequence: Synthetic oligonucleotide
gaccuaggaagcuugcucag

SEQ ID NO: 933 - RNA, 20 nt, Artificial Sequence
  Description of Artificial Sequence: Synthetic oligonucleotide
ccucacuacacuacaucuug

SEQ ID NO: 934 - RNA, 20 nt, Artificial Sequence
  Description of Artificial Sequence: Synthetic oligonucleotide
ccucaagauguaguguagug

SEQ ID NO: 935 - RNA, 20 nt, Artificial Sequence
  Description of Artificial Sequence: Synthetic oligonucleotide
cucaagauguaguguaguga

SEQ ID NO: 936 - RNA, 20 nt, Artificial Sequence
  Description of Artificial Sequence: Synthetic oligonucleotide
gagacaauaagucuagcuug

SEQ ID NO: 937 - RNA, 20 nt, Artificial Sequence
  Description of Artificial Sequence: Synthetic oligonucleotide
guaggaacguauuugaaggu

SEQ ID NO: 938 - RNA, 20 nt, Artificial Sequence
  Description of Artificial Sequence: Synthetic oligonucleotide
aguaggaacguauuugaagg

SEQ ID NO: 939 - RNA, 20 nt, Artificial Sequence
  Description of Artificial Sequence: Synthetic oligonucleotide
caaaguaggaacguauuuga

SEQ ID NO: 940 - RNA, 20 nt, Artificial Sequence
  Description of Artificial Sequence: Synthetic oligonucleotide
uuagguuacuauaacaaagu

SEQ ID NO: 941 - RNA, 20 nt, Artificial Sequence
  Description of Artificial Sequence: Synthetic oligonucleotide
agagacaucaauaccaguuu

SEQ ID NO: 942 - RNA, 20 nt, Artificial Sequence
  Description of Artificial Sequence: Synthetic oligonucleotide
ugagauacaaugcagaacca

SEQ ID NO: 943 - RNA, 20 nt, Artificial Sequence
  Description of Artificial Sequence: Synthetic oligonucleotide
acaaguagauuaacguuuug

SEQ ID NO: 944 - RNA, 20 nt, Artificial Sequence
  Description of Artificial Sequence: Synthetic oligonucleotide
gacaguauagauuugaugac

SEQ ID NO: 945 - RNA, 20 nt, Artificial Sequence
  Description of Artificial Sequence: Synthetic oligonucleotide
cacauccacauaauaaaaua

SEQ ID NO: 946 - RNA, 20 nt, Artificial Sequence
  Description of Artificial Sequence: Synthetic oligonucleotide
ucuauguuuuugaacaaaac

SEQ ID NO: 947 - RNA, 20 nt, Artificial Sequence
  Description of Artificial Sequence: Synthetic oligonucleotide
cuuuauaagagcuuuucaua

SEQ ID NO: 948 - RNA, 20 nt, Artificial Sequence
  Description of Artificial Sequence: Synthetic oligonucleotide
aagcucuuauaaagccauuc

SEQ ID NO: 949 - RNA, 20 nt, Artificial Sequence
  Description of Artificial Sequence: Synthetic oligonucleotide
cugcauccucauuaccggaa

SEQ ID NO: 950 - RNA, 20 nt, Artificial Sequence
  Description of Artificial Sequence: Synthetic oligonucleotide
auaaagccauuccgguaaug

SEQ ID NO: 951 - RNA, 20 nt, Artificial Sequence
  Description of Artificial Sequence: Synthetic oligonucleotide
uugguacccccugaacagca

SEQ ID NO: 952 - RNA, 20 nt, Artificial Sequence
  Description of Artificial Sequence: Synthetic oligonucleotide
auugguacccccugaacagc

SEQ ID NO: 953 - RNA, 20 nt, Artificial Sequence
  Description of Artificial Sequence: Synthetic oligonucleotide
aguuugucacccugcuguuc

SEQ ID NO: 954 - RNA, 20 nt, Artificial Sequence
  Description of Artificial Sequence: Synthetic oligonucleotide
guuugucacccugcuguuca

SEQ ID NO: 955 - RNA, 20 nt, Artificial Sequence
  Description of Artificial Sequence: Synthetic oligonucleotide
uuugucacccugcuguucag

SEQ ID NO: 956 - RNA, 20 nt, Artificial Sequence
  Description of Artificial Sequence: Synthetic oligonucleotide
uugucacccugcuguucagg

SEQ ID NO: 957 - RNA, 20 nt, Artificial Sequence
  Description of Artificial Sequence: Synthetic oligonucleotide
cccauuuaaagcaacuucau

SEQ ID NO: 958 - RNA, 20 nt, Artificial Sequence
  Description of Artificial Sequence: Synthetic oligonucleotide
ccaaugaaguugcuuuaaau

SEQ ID NO: 959 - RNA, 20 nt, Artificial Sequence
  Description of Artificial Sequence: Synthetic oligonucleotide
accucuaacaccagaacaga

SEQ ID NO: 960 - RNA, 20 nt, Artificial Sequence
  Description of Artificial Sequence: Synthetic oligonucleotide
gguggaacauagaacaugga

SEQ ID NO: 961 - RNA, 20 nt, Artificial Sequence
  Description of Artificial Sequence: Synthetic oligonucleotide
cauggaagguuuuaccucug

SEQ ID NO: 962 - RNA, 20 nt, Artificial Sequence
  Description of Artificial Sequence: Synthetic oligonucleotide
cuucacuguuaccaccucag

SEQ ID NO: 963 - RNA, 20 nt, Artificial Sequence
  Description of Artificial Sequence: Synthetic oligonucleotide
cccacuuauuauaaucacag

SEQ ID NO: 964 - RNA, 20 nt, Artificial Sequence
  Description of Artificial Sequence: Synthetic oligonucleotide
accucugugauuauaauaag

SEQ ID NO: 965 - RNA, 20 nt, Artificial Sequence
  Description of Artificial Sequence: Synthetic oligonucleotide
ccucugugauuauaauaagu

SEQ ID NO: 966 - RNA, 20 nt, Artificial Sequence
  Description of Artificial Sequence: Synthetic oligonucleotide
ugaaugguaguguagcauua

SEQ ID NO: 967 - RNA, 20 nt, Artificial Sequence
  Description of Artificial Sequence: Synthetic oligonucleotide
gaaagggugugcaaauguca

SEQ ID NO: 968 - RNA, 20 nt, Artificial Sequence
  Description of Artificial Sequence: Synthetic oligonucleotide
gcagcacauaaacauguguu

SEQ ID NO: 969 - RNA, 20 nt, Artificial Sequence
  Description of Artificial Sequence: Synthetic oligonucleotide
ugugauguagagacuccugc

SEQ ID NO: 970 - RNA, 20 nt, Artificial Sequence
  Description of Artificial Sequence: Synthetic oligonucleotide
gugauguagagacuccugcu

SEQ ID NO: 971 - RNA, 20 nt, Artificial Sequence
  Description of Artificial Sequence: Synthetic oligonucleotide
gugcuaaugcaucacccagc

SEQ ID NO: 972 - RNA, 20 nt, Artificial Sequence
  Description of Artificial Sequence: Synthetic oligonucleotide
uuaaugauaucacuccaaaa

SEQ ID NO: 973 - RNA, 20 nt, Artificial Sequence
  Description of Artificial Sequence: Synthetic oligonucleotide
acagaauucuaaaaccuacg

SEQ ID NO: 974 - RNA, 20 nt, Artificial Sequence
  Description of Artificial Sequence: Synthetic oligonucleotide
cagaauucuaaaaccuacga

SEQ ID NO: 975 - RNA, 20 nt, Artificial Sequence
  Description of Artificial Sequence: Synthetic oligonucleotide
ucauuuuuuccaccccucgu

SEQ ID NO: 976 - RNA, 20 nt, Artificial Sequence
  Description of Artificial Sequence: Synthetic oligonucleotide
auucuaaaaccuacgagggg

SEQ ID NO: 977 - RNA, 20 nt, Artificial Sequence
  Description of Artificial Sequence: Synthetic oligonucleotide
gggguggaaaaaaugauugu

SEQ ID NO: 978 - RNA, 20 nt, Artificial Sequence
  Description of Artificial Sequence: Synthetic oligonucleotide
augucaaagauacugguaau

SEQ ID NO: 979 - RNA, 20 nt, Artificial Sequence
  Description of Artificial Sequence: Synthetic oligonucleotide
auauuucuacuauccuuuaa

SEQ ID NO: 980 - RNA, 20 nt, Artificial Sequence
  Description of Artificial Sequence: Synthetic oligonucleotide
aauauuucuacuauccuuua

SEQ ID NO: 981 - RNA, 20 nt, Artificial Sequence
  Description of Artificial Sequence: Synthetic oligonucleotide
aaugguaaacaagacaaguu

SEQ ID NO: 982 - RNA, 20 nt, Artificial Sequence
  Description of Artificial Sequence: Synthetic oligonucleotide
uacuucaauuaguuaauacc

SEQ ID NO: 983 - RNA, 20 nt, Artificial Sequence
  Description of Artificial Sequence: Synthetic oligonucleotide
cuucaauuaguuaauaccug

SEQ ID NO: 984 - RNA, 20 nt, Artificial Sequence
  Description of Artificial Sequence: Synthetic oligonucleotide
aauuuaaagaaccugcuauu

SEQ ID NO: 985 - RNA, 20 nt, Artificial Sequence
  Description of Artificial Sequence: Synthetic oligonucleotide
auucaaacacaaguuccauc

SEQ ID NO: 986 - RNA, 20 nt, Artificial Sequence
  Description of Artificial Sequence: Synthetic oligonucleotide
ugcaagggaacuuuucauag

SEQ ID NO: 987 - RNA, 20 nt, Artificial Sequence
  Description of Artificial Sequence: Synthetic oligonucleotide
gcaagggaacuuuucauagu

SEQ ID NO: 988 - RNA, 20 nt, Artificial Sequence
  Description of Artificial Sequence: Synthetic oligonucleotide
ggggguaggcauuacaguca

SEQ ID NO: 989 - RNA, 20 nt, Artificial Sequence
  Description of Artificial Sequence: Synthetic oligonucleotide
cauuacagucauggugugaa

SEQ ID NO: 990 - RNA, 20 nt, Artificial Sequence
  Description of Artificial Sequence: Synthetic oligonucleotide
gaucugguggucuagugcaa

SEQ ID NO: 991 - RNA, 20 nt, Artificial Sequence
  Description of Artificial Sequence: Synthetic oligonucleotide
uuaucccacuuaugaucugg

SEQ ID NO: 992 - RNA, 20 nt, Artificial Sequence
  Description of Artificial Sequence: Synthetic oligonucleotide
caguuaucccacuuaugauc

SEQ ID NO: 993 - RNA, 20 nt, Artificial Sequence
  Description of Artificial Sequence: Synthetic oligonucleotide
uagaccaccagaucauaagu

SEQ ID NO: 994 - RNA, 20 nt, Artificial Sequence
  Description of Artificial Sequence: Synthetic oligonucleotide
uagagaaugccuagaauuug

SEQ ID NO: 995 - RNA, 20 nt, Artificial Sequence
  Description of Artificial Sequence: Synthetic oligonucleotide
aguuaagguuaauuugaaua

SEQ ID NO: 996 - RNA, 20 nt, Artificial Sequence
  Description of Artificial Sequence: Synthetic oligonucleotide
cacuuaaguagguuuaucag

SEQ ID NO: 997 - RNA, 20 nt, Artificial Sequence
  Description of Artificial Sequence: Synthetic oligonucleotide
guauuagcaaucuccacgug

SEQ ID NO: 998 - RNA, 20 nt, Artificial Sequence
  Description of Artificial Sequence: Synthetic oligonucleotide
auuuuguauacaugacguau

SEQ ID NO: 999 - RNA, 20 nt, Artificial Sequence
  Description of Artificial Sequence: Synthetic oligonucleotide
aagaacaauauuaaccuuug

SEQ ID NO: 1000 - RNA, 20 nt, Artificial Sequence
  Description of Artificial Sequence: Synthetic oligonucleotide
cuagacuaaauguguuaaau

SEQ ID NO: 1001 - RNA, 20 nt, Artificial Sequence
  Description of Artificial Sequence: Synthetic oligonucleotide
cuucaaaucauccauauugu

SEQ ID NO: 1002 - RNA, 20 nt, Artificial Sequence
  Description of Artificial Sequence: Synthetic oligonucleotide
uucuuuagcaccaguaauau

SEQ ID NO: 1003 - RNA, 20 nt, Artificial Sequence
  Description of Artificial Sequence: Synthetic oligonucleotide
aagauaaacaccgauauuac

SEQ ID NO: 1004 - RNA, 20 nt, Artificial Sequence
  Description of Artificial Sequence: Synthetic oligonucleotide
uuguccuuugacaguucuuc

SEQ ID NO: 1005 - RNA, 20 nt, Artificial Sequence
  Description of Artificial Sequence: Synthetic oligonucleotide
ucugaaaacgccuuaagugg

SEQ ID NO: 1006 - RNA, 20 nt, Artificial Sequence
  Description of Artificial Sequence: Synthetic oligonucleotide
ucuagucuauuuauacaugc

SEQ ID NO: 1007 - RNA, 20 nt, Artificial Sequence
  Description of Artificial Sequence: Synthetic oligonucleotide
gaaaacuuuaucuugccuaa

SEQ ID NO: 1008 - RNA, 20 nt, Artificial Sequence
  Description of Artificial Sequence: Synthetic oligonucleotide
auuggaagucuuaguuaagg

SEQ ID NO: 1009 - RNA, 20 nt, Artificial Sequence
  Description of Artificial Sequence: Synthetic oligonucleotide
aacacugccuuuauucauau

SEQ ID NO: 1010 - RNA, 20 nt, Artificial Sequence
  Description of Artificial Sequence: Synthetic oligonucleotide
ggcaguguuucauuaaccac

SEQ ID NO: 1011 - RNA, 20 nt, Artificial Sequence
  Description of Artificial Sequence: Synthetic oligonucleotide
auuaaccacuggacagccug

SEQ ID NO: 1012 - RNA, 20 nt, Artificial Sequence
  Description of Artificial Sequence: Synthetic oligonucleotide
ucuguuguuggcugauccac

SEQ ID NO: 1013 - RNA, 20 nt, Artificial Sequence
  Description of Artificial Sequence: Synthetic oligonucleotide
aguuuuuuauuggaaugggu

SEQ ID NO: 1014 - RNA, 20 nt, Artificial Sequence
  Description of Artificial Sequence: Synthetic oligonucleotide
uaguuuuuuauuggaauggg

SEQ ID NO: 1015 - RNA, 20 nt, Artificial Sequence
  Description of Artificial Sequence: Synthetic oligonucleotide
agagguagguaguuuuuuau

SEQ ID NO: 1016 - RNA, 20 nt, Artificial Sequence
  Description of Artificial Sequence: Synthetic oligonucleotide
gucacaaccaacugaagcag

SEQ ID NO: 1017 - RNA, 20 nt, Artificial Sequence
  Description of Artificial Sequence: Synthetic oligonucleotide
uuuaauaaaucaaguagagg

SEQ ID NO: 1018 - RNA, 20 nt, Artificial Sequence
  Description of Artificial Sequence: Synthetic oligonucleotide
uuaauaaaucaaguagaggu

SEQ ID NO: 1019 - RNA, 20 nt, Artificial Sequence
  Description of Artificial Sequence: Synthetic oligonucleotide
gauugugucaauacaguaac

SEQ ID NO: 1020 - RNA, 20 nt, Artificial Sequence
  Description of Artificial Sequence: Synthetic oligonucleotide
ccuaaauccaucuguaccug

SEQ ID NO: 1021 - RNA, 20 nt, Artificial Sequence
  Description of Artificial Sequence: Synthetic oligonucleotide
ucaauuucuuaugacuaaug

SEQ ID NO: 1022 - RNA, 20 nt, Artificial Sequence
  Description of Artificial Sequence: Synthetic oligonucleotide
ucuagaccuauuuuagaaug

SEQ ID NO: 1023 - RNA, 20 nt, Artificial Sequence
  Description of Artificial Sequence: Synthetic oligonucleotide
gcuccaccucauucuaaaau

SEQ ID NO: 1024 - RNA, 20 nt, Artificial Sequence
  Description of Artificial Sequence: Synthetic oligonucleotide
caagauaacucguuauaccg

SEQ ID NO: 1025 - RNA, 20 nt, Artificial Sequence
  Description of Artificial Sequence: Synthetic oligonucleotide
guuauaaauuagauguugga

SEQ ID NO: 1026 - RNA, 20 nt, Artificial Sequence
  Description of Artificial Sequence: Synthetic oligonucleotide
ucucuucuccacacuuaucu

SEQ ID NO: 1027 - RNA, 20 nt, Artificial Sequence
  Description of Artificial Sequence: Synthetic oligonucleotide
cucucuucuccacacuuauc

SEQ ID NO: 1028 - RNA, 20 nt, Artificial Sequence
  Description of Artificial Sequence: Synthetic oligonucleotide
ucuucgguacugaaaguagc

SEQ ID NO: 1029 - RNA, 20 nt, Artificial Sequence
  Description of Artificial Sequence: Synthetic oligonucleotide
uuuguacagggguagaauga

SEQ ID NO: 1030 - RNA, 20 nt, Artificial Sequence
  Description of Artificial Sequence: Synthetic oligonucleotide
auucacauugcacuuuguac

SEQ ID NO: 1031 - RNA, 20 nt, Artificial Sequence
  Description of Artificial Sequence: Synthetic oligonucleotide
caaagugcaaugugaauuuu

SEQ ID NO: 1032 - RNA, 20 nt, Artificial Sequence
  Description of Artificial Sequence: Synthetic oligonucleotide
aaugauacaucauaugccug

SEQ ID NO: 1033 - RNA, 20 nt, Artificial Sequence
  Description of Artificial Sequence: Synthetic oligonucleotide
cauaugauguaucauuuaga

SEQ ID NO: 1034 - RNA, 20 nt, Artificial Sequence
  Description of Artificial Sequence: Synthetic oligonucleotide
auggccuugggacauuaaga

SEQ ID NO: 1035 - RNA, 20 nt, Artificial Sequence
  Description of Artificial Sequence: Synthetic oligonucleotide
uucgccaucuuaauguccca

SEQ ID NO: 1036 - RNA, 20 nt, Artificial Sequence
  Description of Artificial Sequence: Synthetic oligonucleotide
ucucuacaagcauauggccu

SEQ ID NO: 1037 - RNA, 20 nt, Artificial Sequence
  Description of Artificial Sequence: Synthetic oligonucleotide
ucgugaauugaaagaacuuc

SEQ ID NO: 1038 - RNA, 20 nt, Artificial Sequence
  Description of Artificial Sequence: Synthetic oligonucleotide
ccccaugugcaaugccucga

SEQ ID NO: 1039 - RNA, 20 nt, Artificial Sequence
  Description of Artificial Sequence: Synthetic oligonucleotide
gccaucgaggcauugcacau

SEQ ID NO: 1040 - RNA, 20 nt, Artificial Sequence
  Description of Artificial Sequence: Synthetic oligonucleotide
ccaucgaggcauugcacaug

SEQ ID NO: 1041 - RNA, 20 nt, Artificial Sequence
  Description of Artificial Sequence: Synthetic oligonucleotide
aggcauugcacauggggcag

SEQ ID NO: 1042 - RNA, 20 nt, Artificial Sequence
  Description of Artificial Sequence: Synthetic oligonucleotide
ggcagugguaaaaugcccua

SEQ ID NO: 1043 - RNA, 20 nt, Artificial Sequence
  Description of Artificial Sequence: Synthetic oligonucleotide
gcaauaucagaagugaccau

SEQ ID NO: 1044 - RNA, 20 nt, Artificial Sequence
  Description of Artificial Sequence: Synthetic oligonucleotide
cuuuuggcugaaguaguaaa

SEQ ID NO: 1045 - RNA, 20 nt, Artificial Sequence
  Description of Artificial Sequence: Synthetic oligonucleotide
cacuaucuacagguucuuca

SEQ ID NO: 1046 - RNA, 20 nt, Artificial Sequence
  Description of Artificial Sequence: Synthetic oligonucleotide
uuagugcuaucacuaucuac

SEQ ID NO: 1047 - RNA, 20 nt, Artificial Sequence
  Description of Artificial Sequence: Synthetic oligonucleotide
cgagcuuucuguauucugug

SEQ ID NO: 1048 - RNA, 20 nt, Artificial Sequence
  Description of Artificial Sequence: Synthetic oligonucleotide
cacacagaauacagaaagcu

SEQ ID NO: 1049 - RNA, 20 nt, Artificial Sequence
  Description of Artificial Sequence: Synthetic oligonucleotide
cggaaaagcauugcccaauc

SEQ ID NO: 1050 - RNA, 20 nt, Artificial Sequence
  Description of Artificial Sequence: Synthetic oligonucleotide
gcacauguuuacaccugauu

SEQ ID NO: 1051 - RNA, 20 nt, Artificial Sequence
  Description of Artificial Sequence: Synthetic oligonucleotide
ugcacauguuuacaccugau

SEQ ID NO: 1052 - RNA, 20 nt, Artificial Sequence
  Description of Artificial Sequence: Synthetic oligonucleotide
gauggaaauacuuagguuuu

SEQ ID NO: 1053 - RNA, 20 nt, Artificial Sequence
  Description of Artificial Sequence: Synthetic oligonucleotide
cuuuuggcgucaggcuuaug

SEQ ID NO: 1054 - RNA, 20 nt, Artificial Sequence
  Description of Artificial Sequence: Synthetic oligonucleotide
cuuucaggccuuuuggcguc

SEQ ID NO: 1055 - RNA, 20 nt, Artificial Sequence
  Description of Artificial Sequence: Synthetic oligonucleotide
cucauaagccugacgccaaa

SEQ ID NO: 1056 - RNA, 20 nt, Artificial Sequence
  Description of Artificial Sequence: Synthetic oligonucleotide
aguaauuaaggaaucuaaga

SEQ ID NO: 1057 - RNA, 20 nt, Artificial Sequence
  Description of Artificial Sequence: Synthetic oligonucleotide
ucuaagaaggaaaguucugu

SEQ ID NO: 1058 - RNA, 20 nt, Artificial Sequence
  Description of Artificial Sequence: Synthetic oligonucleotide
aagaaggaaaguucuguugg

SEQ ID NO: 1059 - RNA, 20 nt, Artificial Sequence
  Description of Artificial Sequence: Synthetic oligonucleotide
uccugggauaauguugaguu

SEQ ID NO: 1060 - RNA, 20 nt, Artificial Sequence
  Description of Artificial Sequence: Synthetic oligonucleotide
guuaggagacuacacuacac

SEQ ID NO: 1061 - RNA, 20 nt, Artificial Sequence
  Description of Artificial Sequence: Synthetic oligonucleotide
uuauuuaagagcaaagugga

SEQ ID NO: 1062 - RNA, 20 nt, Artificial Sequence
  Description of Artificial Sequence: Synthetic oligonucleotide
cuuaguuaugaccaaaacga

SEQ ID NO: 1063 - RNA, 20 nt, Artificial Sequence
  Description of Artificial Sequence: Synthetic oligonucleotide
uuugaauacuaugaagauac

SEQ ID NO: 1064 - RNA, 20 nt, Artificial Sequence
  Description of Artificial Sequence: Synthetic oligonucleotide
ucugcaguuucuaaaugcug

SEQ ID NO: 1065 - RNA, 20 nt, Artificial Sequence
  Description of Artificial Sequence: Synthetic oligonucleotide
caccuguuucaaauguugcu

SEQ ID NO: 1066 - RNA, 20 nt, Artificial Sequence
  Description of Artificial Sequence: Synthetic oligonucleotide
ugcccagcaacauuugaaac

SEQ ID NO: 1067 - RNA, 20 nt, Artificial Sequence
  Description of Artificial Sequence: Synthetic oligonucleotide
gcaacauuugaaacaggugu

SEQ ID NO: 1068 - RNA, 20 nt, Artificial Sequence
  Description of Artificial Sequence: Synthetic oligonucleotide
uuggguuaucaaaucauguc

SEQ ID NO: 1069 - RNA, 20 nt, Artificial Sequence
  Description of Artificial Sequence: Synthetic oligonucleotide
uggguuaucaaaucauguca

SEQ ID NO: 1070 - RNA, 20 nt, Artificial Sequence
  Description of Artificial Sequence: Synthetic oligonucleotide
gguuaucaaaucaugucagg

SEQ ID NO: 1071 - RNA, 20 nt, Artificial Sequence
  Description of Artificial Sequence: Synthetic oligonucleotide
uucuggugauacaacaugac

SEQ ID NO: 1072 - RNA, 20 nt, Artificial Sequence
  Description of Artificial Sequence: Synthetic oligonucleotide
ucacuuguggcuauuuguuc

SEQ ID NO: 1073 - RNA, 20 nt, Artificial Sequence
  Description of Artificial Sequence: Synthetic oligonucleotide
ccuuuucuaacucguuuaac

SEQ ID NO: 1074 - RNA, 20 nt, Artificial Sequence
  Description of Artificial Sequence: Synthetic oligonucleotide
ccuguuaaacgaguuagaaa

SEQ ID NO: 1075 - RNA, 20 nt, Artificial Sequence
  Description of Artificial Sequence: Synthetic oligonucleotide
uagaaaagguaaguucucca

SEQ ID NO: 1076 - RNA, 20 nt, Artificial Sequence
  Description of Artificial Sequence: Synthetic oligonucleotide
agaaaagguaaguucuccau

SEQ ID NO: 1077 - RNA, 20 nt, Artificial Sequence
  Description of Artificial Sequence: Synthetic oligonucleotide
cugacaaguguguucagaag

SEQ ID NO: 1078 - RNA, 20 nt, Artificial Sequence
  Description of Artificial Sequence: Synthetic oligonucleotide
gaacacacuugucagcucug

SEQ ID NO: 1079 - RNA, 20 nt, Artificial Sequence
  Description of Artificial Sequence: Synthetic oligonucleotide
gguugguuugauacuaaaau

SEQ ID NO: 1080 - RNA, 20 nt, Artificial Sequence
  Description of Artificial Sequence: Synthetic oligonucleotide
aaagacuuggaaagacgaaa

SEQ ID NO: 1081 - RNA, 20 nt, Artificial Sequence
  Description of Artificial Sequence: Synthetic oligonucleotide
aagacuuggaaagacgaaau

SEQ ID NO: 1082 - RNA, 20 nt, Artificial Sequence
  Description of Artificial Sequence: Synthetic oligonucleotide
aucucauucagaacacagau

SEQ ID NO: 1083 - RNA, 20 nt, Artificial Sequence
  Description of Artificial Sequence: Synthetic oligonucleotide
uuuuugagcuacaaaugguc

SEQ ID NO: 1084 - RNA, 20 nt, Artificial Sequence
  Description of Artificial Sequence: Synthetic oligonucleotide
ccauuacgguaugcuucaag

SEQ ID NO: 1085 - RNA, 20 nt, Artificial Sequence
  Description of Artificial Sequence: Synthetic oligonucleotide
ccucuugaagcauaccguaa

SEQ ID NO: 1086 - RNA, 20 nt, Artificial Sequence
  Description of Artificial Sequence: Synthetic oligonucleotide
cuucagucuuuaggccauua

SEQ ID NO: 1087 - RNA, 20 nt, Artificial Sequence
  Description of Artificial Sequence: Synthetic oligonucleotide
gacugauucuuuuucccacu

SEQ ID NO: 1088 - RNA, 20 nt, Artificial Sequence
  Description of Artificial Sequence: Synthetic oligonucleotide
gucugauuauggaucuuuug

SEQ ID NO: 1089 - RNA, 20 nt, Artificial Sequence
  Description of Artificial Sequence: Synthetic oligonucleotide
aacggacuauccucauuuaa

SEQ ID NO: 1090 - RNA, 20 nt, Artificial Sequence
  Description of Artificial Sequence: Synthetic oligonucleotide
uuuuguggcugauacaucaa

SEQ ID NO: 1091 - RNA, 20 nt, Artificial Sequence
  Description of Artificial Sequence: Synthetic oligonucleotide
uucaauuaugccuucuuuaa

SEQ ID NO: 1092 - RNA, 20 nt, Artificial Sequence
  Description of Artificial Sequence: Synthetic oligonucleotide
cuucuuuaauggaaucuaug

SEQ ID NO: 1093 - RNA, 20 nt, Artificial Sequence
  Description of Artificial Sequence: Synthetic oligonucleotide
uacauucagaccaagaaaag

SEQ ID NO: 1094 - RNA, 20 nt, Artificial Sequence
  Description of Artificial Sequence: Synthetic oligonucleotide
cuuuucuuggucugaaugua

SEQ ID NO: 1095 - RNA, 20 nt, Artificial Sequence
  Description of Artificial Sequence: Synthetic oligonucleotide
ggaggaugguuguggauggg

SEQ ID NO: 1096 - RNA, 20 nt, Artificial Sequence
  Description of Artificial Sequence: Synthetic oligonucleotide
aacuggcaaaaauaugacag

SEQ ID NO: 1097 - RNA, 20 nt, Artificial Sequence
  Description of Artificial Sequence: Synthetic oligonucleotide
acucuuaaagcugaauggau

SEQ ID NO: 1098 - RNA, 20 nt, Artificial Sequence
  Description of Artificial Sequence: Synthetic oligonucleotide
uggagagggagauguuucuu

SEQ ID NO: 1099 - RNA, 20 nt, Artificial Sequence
  Description of Artificial Sequence: Synthetic oligonucleotide
uccgcaauacaaugaggaau

SEQ ID NO: 1100 - RNA, 20 nt, Artificial Sequence
  Description of Artificial Sequence: Synthetic oligonucleotide
aacuauuccgcaauacaaug

SEQ ID NO: 1101 - RNA, 20 nt, Artificial Sequence
  Description of Artificial Sequence: Synthetic oligonucleotide
uccaauuccucauuguauug

SEQ ID NO: 1102 - RNA, 20 nt, Artificial Sequence
  Description of Artificial Sequence: Synthetic oligonucleotide
cauuguauugcggaauaguu

SEQ ID NO: 1103 - RNA, 20 nt, Artificial Sequence
  Description of Artificial Sequence: Synthetic oligonucleotide
auugcggaauaguuugguuu

SEQ ID NO: 1104 - RNA, 20 nt, Artificial Sequence
  Description of Artificial Sequence: Synthetic oligonucleotide
guuuuaagauagugcucuaa

SEQ ID NO: 1105 - RNA, 20 nt, Artificial Sequence
  Description of Artificial Sequence: Synthetic oligonucleotide
cagaugauuuagcuuagugc

SEQ ID NO: 1106 - RNA, 20 nt, Artificial Sequence
  Description of Artificial Sequence: Synthetic oligonucleotide
guauguauuggcaaauaaug

SEQ ID NO: 1107 - RNA, 20 nt, Artificial Sequence
  Description of Artificial Sequence: Synthetic oligonucleotide
uggcaauacugaauaaaguu

SEQ ID NO: 1108 - RNA, 20 nt, Artificial Sequence
  Description of Artificial Sequence: Synthetic oligonucleotide
cuaaaaguauaaaccacacu

SEQ ID NO: 1109 - RNA, 20 nt, Artificial Sequence
  Description of Artificial Sequence: Synthetic oligonucleotide
auguugaagguuuauguaaa

SEQ ID NO: 1110 - RNA, 20 nt, Artificial Sequence
  Description of Artificial Sequence: Synthetic oligonucleotide
cucuaaguugaaugugucag

SEQ ID NO: 1111 - RNA, 20 nt, Artificial Sequence
  Description of Artificial Sequence: Synthetic oligonucleotide
aaaacugcauuacaacuauu

SEQ ID NO: 1112 - RNA, 20 nt, Artificial Sequence
  Description of Artificial Sequence: Synthetic oligonucleotide
uguaaugcaguuuugauuua

SEQ ID NO: 1113 - RNA, 20 nt, Artificial Sequence
  Description of Artificial Sequence: Synthetic oligonucleotide
guaugagcuucuguuuaauc

SEQ ID NO: 1114 - RNA, 20 nt, Artificial Sequence
  Description of Artificial Sequence: Synthetic oligonucleotide
cuuuauucgaaagaaaaagc

SEQ ID NO: 1115 - RNA, 20 nt, Artificial Sequence
  Description of Artificial Sequence: Synthetic oligonucleotide
uguguuagcuguguugacca

SEQ ID NO: 1116 - RNA, 20 nt, Artificial Sequence
  Description of Artificial Sequence: Synthetic oligonucleotide
cucugaaguauacuaccccu

SEQ ID NO: 1117 - RNA, 20 nt, Artificial Sequence
  Description of Artificial Sequence: Synthetic oligonucleotide
ugaggauugucugagaaguu

SEQ ID NO: 1118 - RNA, 20 nt, Artificial Sequence
  Description of Artificial Sequence: Synthetic oligonucleotide
gcuaacaucuuagucaucac

SEQ ID NO: 1119 - RNA, 20 nt, Artificial Sequence
  Description of Artificial Sequence: Synthetic oligonucleotide
uaggcuuucugaugaaggcu

SEQ ID NO: 1120 - RNA, 20 nt, Artificial Sequence
  Description of Artificial Sequence: Synthetic oligonucleotide
auuuaguauugagacuuuua

SEQ ID NO: 1121 - RNA, 20 nt, Artificial Sequence
  Description of Artificial Sequence: Synthetic oligonucleotide
uugagacuuuuacgguuuug

SEQ ID NO: 1122 - RNA, 20 nt, Artificial Sequence
  Description of Artificial Sequence: Synthetic oligonucleotide
ugagacuuuuacgguuuugu

SEQ ID NO: 1123 - RNA, 20 nt, Artificial Sequence
  Description of Artificial Sequence: Synthetic oligonucleotide
aaccguguuguucaaaucac

SEQ ID NO: 1124 - RNA, 20 nt, Artificial Sequence
  Description of Artificial Sequence: Synthetic oligonucleotide
ucacaggauuguauuguagu

SEQ ID NO: 1125 - RNA, 20 nt, Artificial Sequence
  Description of Artificial Sequence: Synthetic oligonucleotide
cuugaaccuuugagcuccuc

SEQ ID NO: 1126 - RNA, 20 nt, Artificial Sequence
  Description of Artificial Sequence: Synthetic oligonucleotide
guauauccagaggagcucaa

SEQ ID NO: 1127 - RNA, 20 nt, Artificial Sequence
  Description of Artificial Sequence: Synthetic oligonucleotide
gcucuuuggaaagguagacg

SEQ ID NO: 1128 - RNA, 20 nt, Artificial Sequence
  Description of Artificial Sequence: Synthetic oligonucleotide
ucaacucaugcucuuuggaa

SEQ ID NO: 1129 - RNA, 20 nt, Artificial Sequence
  Description of Artificial Sequence: Synthetic oligonucleotide
gguuaacuuaaaauaaggag

SEQ ID NO: 1130 - RNA, 20 nt, Artificial Sequence
  Description of Artificial Sequence: Synthetic oligonucleotide
aaauagguuaacuuaaaaua

SEQ ID NO: 1131 - RNA, 20 nt, Artificial Sequence
  Description of Artificial Sequence: Synthetic oligonucleotide
aagcgcguaagugguuggac

SEQ ID NO: 1132 - RNA, 20 nt, Artificial Sequence
  Description of Artificial Sequence: Synthetic oligonucleotide
ugcauaagcgcguaaguggu

SEQ ID NO: 1133 - RNA, 20 nt, Artificial Sequence
  Description of Artificial Sequence: Synthetic oligonucleotide
uucgugcauaagcgcguaag

SEQ ID NO: 1134 - RNA, 20 nt, Artificial Sequence
  Description of Artificial Sequence: Synthetic oligonucleotide
uaugcacgaaagaagagugc

SEQ ID NO: 1135 - RNA, 20 nt, Artificial Sequence
  Description of Artificial Sequence: Synthetic oligonucleotide
gcuggacuuuugacugguac

SEQ ID NO: 1136 - RNA, 20 nt, Artificial Sequence
  Description of Artificial Sequence: Synthetic oligonucleotide
gaauuaacaccagucuggug

SEQ ID NO: 1137 - RNA, 20 nt, Artificial Sequence
  Description of Artificial Sequence: Synthetic oligonucleotide
ugaauuaacaccagucuggu

SEQ ID NO: 1138 - RNA, 20 nt, Artificial Sequence
  Description of Artificial Sequence: Synthetic oligonucleotide
cugaauuaacaccagucugg

SEQ ID NO: 1139 - RNA, 20 nt, Artificial Sequence
  Description of Artificial Sequence: Synthetic oligonucleotide
gaucugaauuaacaccaguc

SEQ ID NO: 1140 - RNA, 20 nt, Artificial Sequence
  Description of Artificial Sequence: Synthetic oligonucleotide
acaaguugcugaaauucaau

SEQ ID NO: 1141 - RNA, 20 nt, Artificial Sequence
  Description of Artificial Sequence: Synthetic oligonucleotide
uacaaguugcugaaauucaa

SEQ ID NO: 1142 - RNA, 20 nt, Artificial Sequence
  Description of Artificial Sequence: Synthetic oligonucleotide
ggcucuuauugacuuaauuu

SEQ ID NO: 1143 - RNA, 20 nt, Artificial Sequence
  Description of Artificial Sequence: Synthetic oligonucleotide
aaaaauuaacccaagaggug

SEQ ID NO: 1144 - RNA, 20 nt, Artificial Sequence
  Description of Artificial Sequence: Synthetic oligonucleotide
cuaaaaaauaaaugggauua

SEQ ID NO: 1145 - RNA, 20 nt, Artificial Sequence
  Description of Artificial Sequence: Synthetic oligonucleotide
ccgacuagaacuauaaagag

SEQ ID NO: 1146 - RNA, 20 nt, Artificial Sequence
  Description of Artificial Sequence: Synthetic oligonucleotide
aaaauauuguaguucuagcu

SEQ ID NO: 1147 - RNA, 20 nt, Artificial Sequence
  Description of Artificial Sequence: Synthetic oligonucleotide
aaauauuguaguucuagcuu

SEQ ID NO: 1148 - RNA, 20 nt, Artificial Sequence
  Description of Artificial Sequence: Synthetic oligonucleotide
gaaggggugagccuuaauaa

SEQ ID NO: 1149 - RNA, 20 nt, Artificial Sequence
  Description of Artificial Sequence: Synthetic oligonucleotide
uaagagguaucugcaagguu

SEQ ID NO: 1150 - RNA, 20 nt, Artificial Sequence
  Description of Artificial Sequence: Synthetic oligonucleotide
uuaagagguaucugcaaggu

SEQ ID NO: 1151 - RNA, 20 nt, Artificial Sequence
  Description of Artificial Sequence: Synthetic oligonucleotide
aguauuaagagguaucugca

SEQ ID NO: 1152 - RNA, 20 nt, Artificial Sequence
  Description of Artificial Sequence: Synthetic oligonucleotide
aggguauauuuuaagaugug

SEQ ID NO: 1153 - RNA, 20 nt, Artificial Sequence
  Description of Artificial Sequence: Synthetic oligonucleotide
gaucuaaguucuaggacaug

SEQ ID NO: 1154 - RNA, 20 nt, Artificial Sequence
  Description of Artificial Sequence: Synthetic oligonucleotide
acauauuggaucuaaguucu

SEQ ID NO: 1155 - RNA, 20 nt, Artificial Sequence
  Description of Artificial Sequence: Synthetic oligonucleotide
gacacuaguauaaauauaag

SEQ ID NO: 1156 - RNA, 20 nt, Artificial Sequence
  Description of Artificial Sequence: Synthetic oligonucleotide
gucauuuguauaucaaguua

SEQ ID NO: 1157 - RNA, 20 nt, Artificial Sequence
  Description of Artificial Sequence: Synthetic oligonucleotide
aacuugauauacaaaugacc

SEQ ID NO: 1158 - RNA, 20 nt, Artificial Sequence
  Description of Artificial Sequence: Synthetic oligonucleotide
acuugauauacaaaugacca

SEQ ID NO: 1159 - RNA, 20 nt, Artificial Sequence
  Description of Artificial Sequence: Synthetic oligonucleotide
aaauugucaacauucauccc

SEQ ID NO: 1160 - RNA, 20 nt, Artificial Sequence
  Description of Artificial Sequence: Synthetic oligonucleotide
uggggugaguuuuagucuac

SEQ ID NO: 1161 - RNA, 20 nt, Artificial Sequence
  Description of Artificial Sequence: Synthetic oligonucleotide
gaguuuuagucuacuggauu

SEQ ID NO: 1162 - RNA, 20 nt, Artificial Sequence
  Description of Artificial Sequence: Synthetic oligonucleotide
uauauacccucaccuuuauc

SEQ ID NO: 1163 - RNA, 20 nt, Artificial Sequence
  Description of Artificial Sequence: Synthetic oligonucleotide
ugauugcagacauuagaggu

SEQ ID NO: 1164 - RNA, 20 nt, Artificial Sequence
  Description of Artificial Sequence: Synthetic oligonucleotide
gauugcagacauuagaggug

SEQ ID NO: 1165 - RNA, 20 nt, Artificial Sequence
  Description of Artificial Sequence: Synthetic oligonucleotide
ucaauaaaaguuagcaagua

SEQ ID NO: 1166 - RNA, 20 nt, Artificial Sequence
  Description of Artificial Sequence: Synthetic oligonucleotide
uccaguaccuacaacuugua

SEQ ID NO: 1167 - RNA, 20 nt, Artificial Sequence
  Description of Artificial Sequence: Synthetic oligonucleotide
aaaaauagaccgccugugua

SEQ ID NO: 1168 - RNA, 20 nt, Artificial Sequence
  Description of Artificial Sequence: Synthetic oligonucleotide
gaaaauucuaaaaugaaggu

SEQ ID NO: 1169 - RNA, 20 nt, Artificial Sequence
  Description of Artificial Sequence: Synthetic oligonucleotide
cccauuuuaaacccaccuuc

SEQ ID NO: 1170 - RNA, 20 nt, Artificial Sequence
  Description of Artificial Sequence: Synthetic oligonucleotide
guuuaaaauggggacuauuc

SEQ ID NO: 1171 - RNA, 20 nt, Artificial Sequence
  Description of Artificial Sequence: Synthetic oligonucleotide
auuuaggccuaagcacuucu

SEQ ID NO: 1172 - RNA, 20 nt, Artificial Sequence
  Description of Artificial Sequence: Synthetic oligonucleotide
aggccuaaauuagacuuuag

SEQ ID NO: 1173 - RNA, 20 nt, Artificial Sequence
  Description of Artificial Sequence: Synthetic oligonucleotide
aucugcuugaauaaucagaa

SEQ ID NO: 1174 - RNA, 20 nt, Artificial Sequence
  Description of Artificial Sequence: Synthetic oligonucleotide
uggacuaauaaaaucuggac

SEQ ID NO: 1175 - RNA, 20 nt, Artificial Sequence
  Description of Artificial Sequence: Synthetic oligonucleotide
aaaaguaauguaggaugacu

SEQ ID NO: 1176 - RNA, 20 nt, Artificial Sequence
  Description of Artificial Sequence: Synthetic oligonucleotide
aacacccucuuuuauucuuc

SEQ ID NO: 1177 - RNA, 20 nt, Artificial Sequence
  Description of Artificial Sequence: Synthetic oligonucleotide
accaaaauauuagaaguacu

SEQ ID NO: 1178 - RNA, 20 nt, Artificial Sequence
  Description of Artificial Sequence: Synthetic oligonucleotide
agcguguguuuggcaguccu

SEQ ID NO: 1179 - RNA, 20 nt, Artificial Sequence
  Description of Artificial Sequence: Synthetic oligonucleotide
gguguggaaaauaagacccu

SEQ ID NO: 1180 - RNA, 20 nt, Artificial Sequence
  Description of Artificial Sequence: Synthetic oligonucleotide
ucaaaaguggcuacugggug

SEQ ID NO: 1181 - RNA, 20 nt, Artificial Sequence
  Description of Artificial Sequence: Synthetic oligonucleotide
guuucucaaaaguggcuacu

SEQ ID NO: 1182 - RNA, 20 nt, Artificial Sequence
  Description of Artificial Sequence: Synthetic oligonucleotide
aguuucucaaaaguggcuac

SEQ ID NO: 1183 - RNA, 20 nt, Artificial Sequence
  Description of Artificial Sequence: Synthetic oligonucleotide
uaugggggauaaucaguaug

SEQ ID NO: 1184 - RNA, 20 nt, Artificial Sequence
  Description of Artificial Sequence: Synthetic oligonucleotide
uaacagugauauugauaugg

SEQ ID NO: 1185 - RNA, 20 nt, Artificial Sequence
  Description of Artificial Sequence: Synthetic oligonucleotide
uuauaacagugauauugaua

SEQ ID NO: 1186 - RNA, 20 nt, Artificial Sequence
  Description of Artificial Sequence: Synthetic oligonucleotide
uucuagggccauagguuuuu

SEQ ID NO: 1187 - RNA, 20 nt, Artificial Sequence
  Description of Artificial Sequence: Synthetic oligonucleotide
guggaaccuucuagggccau

SEQ ID NO: 1188 - RNA, 20 nt, Artificial Sequence
  Description of Artificial Sequence: Synthetic oligonucleotide
uggcccuagaagguuccacu

SEQ ID NO: 1189 - RNA, 20 nt, Artificial Sequence
  Description of Artificial Sequence: Synthetic oligonucleotide
aaucacuuauaauaaccaag

SEQ ID NO: 1190 - RNA, 20 nt, Artificial Sequence
  Description of Artificial Sequence: Synthetic oligonucleotide
cauuaauucauaugaguaac

SEQ ID NO: 1191 - RNA, 20 nt, Artificial Sequence
  Description of Artificial Sequence: Synthetic oligonucleotide
uccaauuuugugauauacua

SEQ ID NO: 1192 - RNA, 20 nt, Artificial Sequence
  Description of Artificial Sequence: Synthetic oligonucleotide
accuuaguauaucacaaaau

SEQ ID NO: 1193 - RNA, 20 nt, Artificial Sequence
  Description of Artificial Sequence: Synthetic oligonucleotide
cauacuggacaugguuaggg

SEQ ID NO: 1194 - RNA, 20 nt, Artificial Sequence
  Description of Artificial Sequence: Synthetic oligonucleotide
acacauacuggacaugguua

SEQ ID NO: 1195 - RNA, 20 nt, Artificial Sequence
  Description of Artificial Sequence: Synthetic oligonucleotide
cuaagcuuuguauucaagag

SEQ ID NO: 1196 - RNA, 20 nt, Artificial Sequence
  Description of Artificial Sequence: Synthetic oligonucleotide
gccuuuaccauuuagucuga

SEQ ID NO: 1197 - RNA, 20 nt, Artificial Sequence
  Description of Artificial Sequence: Synthetic oligonucleotide
ggccuuuaccauuuagucug

SEQ ID NO: 1198 - RNA, 20 nt, Artificial Sequence
  Description of Artificial Sequence: Synthetic oligonucleotide
uuagauacccucagacuaaa

SEQ ID NO: 1199 - RNA, 20 nt, Artificial Sequence
  Description of Artificial Sequence: Synthetic oligonucleotide
acccucagacuaaaugguaa

SEQ ID NO: 1200 - RNA, 20 nt, Artificial Sequence
  Description of Artificial Sequence: Synthetic oligonucleotide
uugaaaguuuauucuaucac

SEQ ID NO: 1201 - RNA, 20 nt, Artificial Sequence
  Description of Artificial Sequence: Synthetic oligonucleotide
gggaacuggugaccuuuuga

SEQ ID NO: 1202 - RNA, 20 nt, Artificial Sequence
  Description of Artificial Sequence: Synthetic oligonucleotide
uuaccaguaaacagguauuu

SEQ ID NO: 1203 - RNA, 20 nt, Artificial Sequence
  Description of Artificial Sequence: Synthetic oligonucleotide
uauuuaaguuaccaguaaac

SEQ ID NO: 1204 - RNA, 20 nt, Artificial Sequence
  Description of Artificial Sequence: Synthetic oligonucleotide
caugaaauucucaaagaugu

SEQ ID NO: 1205 - RNA, 20 nt, Artificial Sequence
  Description of Artificial Sequence: Synthetic oligonucleotide
agacuuugcguaucuccuga

SEQ ID NO: 1206 - RNA, 20 nt, Artificial Sequence
  Description of Artificial Sequence: Synthetic oligonucleotide
acaaauugaugauagccuuc

SEQ ID NO: 1207 - RNA, 20 nt, Artificial Sequence
  Description of Artificial Sequence: Synthetic oligonucleotide
gcuaucaucaauuugucuga

SEQ ID NO: 1208 - RNA, 20 nt, Artificial Sequence
  Description of Artificial Sequence: Synthetic oligonucleotide
gucugauggcaaauugagaa

SEQ ID NO: 1209 - RNA, 20 nt, Artificial Sequence
  Description of Artificial Sequence: Synthetic oligonucleotide
uaauagcaaaacuaauugug

SEQ ID NO: 1210 - RNA, 20 nt, Artificial Sequence
  Description of Artificial Sequence: Synthetic oligonucleotide
cgguuccuuuuacaaauauu

SEQ ID NO: 1211 - RNA, 20 nt, Artificial Sequence
  Description of Artificial Sequence: Synthetic oligonucleotide
auauuuguaaaaggaaccga

SEQ ID NO: 1212 - RNA, 20 nt, Artificial Sequence
  Description of Artificial Sequence: Synthetic oligonucleotide
uauuuguaaaaggaaccgau

SEQ ID NO: 1213 - RNA, 20 nt, Artificial Sequence
  Description of Artificial Sequence: Synthetic oligonucleotide
uuuguaaaaggaaccgaugg

SEQ ID NO: 1214 - RNA, 20 nt, Artificial Sequence
  Description of Artificial Sequence: Synthetic oligonucleotide
aucuuuccuauuucccccau

SEQ ID NO: 1215 - RNA, 20 nt, Artificial Sequence
  Description of Artificial Sequence: Synthetic oligonucleotide
aaggaaccgaugggggaaau

SEQ ID NO: 1216 - RNA, 20 nt, Artificial Sequence
  Description of Artificial Sequence: Synthetic oligonucleotide
uuggaagaggugggcagacu

SEQ ID NO: 1217 - RNA, 20 nt, Artificial Sequence
  Description of Artificial Sequence: Synthetic oligonucleotide
gucccaguuuaucuucuguu

SEQ ID NO: 1218 - RNA, 20 nt, Artificial Sequence
  Description of Artificial Sequence: Synthetic oligonucleotide
caguuuaucuucuguugggu

SEQ ID NO: 1219 - RNA, 20 nt, Artificial Sequence
  Description of Artificial Sequence: Synthetic oligonucleotide
gauaaagauugaucggggaa

SEQ ID NO: 1220 - RNA, 20 nt, Artificial Sequence
  Description of Artificial Sequence: Synthetic oligonucleotide
auuuugauaaagauugaucg

SEQ ID NO: 1221 - RNA, 20 nt, Artificial Sequence
  Description of Artificial Sequence: Synthetic oligonucleotide
ucaaaauagacuagaaucaa

SEQ ID NO: 1222 - RNA, 20 nt, Artificial Sequence
  Description of Artificial Sequence: Synthetic oligonucleotide
uauggaaugcaguaauggua

SEQ ID NO: 1223 - RNA, 20 nt, Artificial Sequence
  Description of Artificial Sequence: Synthetic oligonucleotide
auggaaugcaguaaugguag

SEQ ID NO: 1224 - RNA, 20 nt, Artificial Sequence
  Description of Artificial Sequence: Synthetic oligonucleotide
caucauuuaauuaaaacauu

SEQ ID NO: 1225 - RNA, 20 nt, Artificial Sequence
  Description of Artificial Sequence: Synthetic oligonucleotide
aguacuuaggugugacaaca

SEQ ID NO: 1226 - RNA, 20 nt, Artificial Sequence
  Description of Artificial Sequence: Synthetic oligonucleotide
uaucaaccuaaucugcaauc

SEQ ID NO: 1227 - RNA, 20 nt, Artificial Sequence
  Description of Artificial Sequence: Synthetic oligonucleotide
aagagugaauuucaacaggu

SEQ ID NO: 1228 - RNA, 20 nt, Artificial Sequence
  Description of Artificial Sequence: Synthetic oligonucleotide
agagugaauuucaacaggua

SEQ ID NO: 1229 - RNA, 20 nt, Artificial Sequence
  Description of Artificial Sequence: Synthetic oligonucleotide
ucuaccauagaaaagcauug

SEQ ID NO: 1230 - RNA, 20 nt, Artificial Sequence
  Description of Artificial Sequence: Synthetic oligonucleotide
uuaauguaaguuuguacaug

SEQ ID NO: 1231 - RNA, 20 nt, Artificial Sequence
  Description of Artificial Sequence: Synthetic oligonucleotide
uacauuuaggugaguacaca

SEQ ID NO: 1232 - RNA, 20 nt, Artificial Sequence
  Description of Artificial Sequence: Synthetic oligonucleotide
augauagugacuucuuaagu

SEQ ID NO: 1233 - RNA, 20 nt, Artificial Sequence
  Description of Artificial Sequence: Synthetic oligonucleotide
ugccucuuucucuuaggggu

SEQ ID NO: 1234 - RNA, 20 nt, Artificial Sequence
  Description of Artificial Sequence: Synthetic oligonucleotide
uagggguugguacugaccaa

SEQ ID NO: 1235 - RNA, 20 nt, Artificial Sequence
  Description of Artificial Sequence: Synthetic oligonucleotide
aucuaagauacuacuaccau

SEQ ID NO: 1236 - RNA, 20 nt, Artificial Sequence
  Description of Artificial Sequence: Synthetic oligonucleotide
uagaugucauaacucuucug

SEQ ID NO: 1237 - RNA, 20 nt, Artificial Sequence
  Description of Artificial Sequence: Synthetic oligonucleotide
guaaaucaaaugcuaaccuc

SEQ ID NO: 1238 - RNA, 20 nt, Artificial Sequence
  Description of Artificial Sequence: Synthetic oligonucleotide
ccaauuacuuuaagucccag

SEQ ID NO: 1239 - RNA, 20 nt, Artificial Sequence
  Description of Artificial Sequence: Synthetic oligonucleotide
ccucugggacuuaaaguaau

SEQ ID NO: 1240 - RNA, 20 nt, Artificial Sequence
  Description of Artificial Sequence: Synthetic oligonucleotide
aacguaucaagaaaguguuc

SEQ ID NO: 1241 - RNA, 20 nt, Artificial Sequence
  Description of Artificial Sequence: Synthetic oligonucleotide
aacacuuucuugauacguuu

SEQ ID NO: 1242 - RNA, 20 nt, Artificial Sequence
  Description of Artificial Sequence: Synthetic oligonucleotide
guuguagaauagcaacaauu

SEQ ID NO: 1243 - RNA, 20 nt, Artificial Sequence
  Description of Artificial Sequence: Synthetic oligonucleotide
uguuguagaauagcaacaau

SEQ ID NO: 1244 - RNA, 20 nt, Artificial Sequence
  Description of Artificial Sequence: Synthetic oligonucleotide
auuauuugacuuuucugaug

SEQ ID NO: 1245 - RNA, 20 nt, Artificial Sequence
  Description of Artificial Sequence: Synthetic oligonucleotide
cgauuacacuuaaaaguaaa

SEQ ID NO: 1246 - RNA, 20 nt, Artificial Sequence
  Description of Artificial Sequence: Synthetic oligonucleotide
cuuuuaaguguaaucguagu

SEQ ID NO: 1247 - RNA, 20 nt, Artificial Sequence
  Description of Artificial Sequence: Synthetic oligonucleotide
aaugauauaauuggccacac

SEQ ID NO: 1248 - RNA, 20 nt, Artificial Sequence
  Description of Artificial Sequence: Synthetic oligonucleotide
gcacaguaucaagugcugaa

SEQ ID NO: 1249 - RNA, 20 nt, Artificial Sequence
  Description of Artificial Sequence: Synthetic oligonucleotide
cauaagaaugacuuuucuag

SEQ ID NO: 1250 - RNA, 20 nt, Artificial Sequence
  Description of Artificial Sequence: Synthetic oligonucleotide
uuauguuguggaaagugcua

SEQ ID NO: 1251 - RNA, 20 nt, Artificial Sequence
  Description of Artificial Sequence: Synthetic oligonucleotide
cuugacaauucuuccagacu

SEQ ID NO: 1252 - RNA, 20 nt, Artificial Sequence
  Description of Artificial Sequence: Synthetic oligonucleotide
aauucuuccagacugggcug

SEQ ID NO: 1253 - RNA, 20 nt, Artificial Sequence
  Description of Artificial Sequence: Synthetic oligonucleotide
ucuuccagacugggcugagg

SEQ ID NO: 1254 - RNA, 20 nt, Artificial Sequence
  Description of Artificial Sequence: Synthetic oligonucleotide
uauacaacuaaauggcauau

SEQ ID NO: 1255 - RNA, 20 nt, Artificial Sequence
  Description of Artificial Sequence: Synthetic oligonucleotide
uuagucuaagccuccuuuug

SEQ ID NO: 1256 - RNA, 20 nt, Artificial Sequence
  Description of Artificial Sequence: Synthetic oligonucleotide
guaagggcaucagaaaaaaa

SEQ ID NO: 1257 - RNA, 20 nt, Artificial Sequence
  Description of Artificial Sequence: Synthetic oligonucleotide
auucaaugagacaaacagua

SEQ ID NO: 1258 - RNA, 20 nt, Artificial Sequence
  Description of Artificial Sequence: Synthetic oligonucleotide
ggcucagcgaugaacagucu

SEQ ID NO: 1259 - RNA, 20 nt, Artificial Sequence
  Description of Artificial Sequence: Synthetic oligonucleotide
uaaacauaauauaacccagu

SEQ ID NO: 1260 - RNA, 20 nt, Artificial Sequence
  Description of Artificial Sequence: Synthetic oligonucleotide
cauacuugaucuuuucccac

SEQ ID NO: 1261 - RNA, 20 nt, Artificial Sequence
  Description of Artificial Sequence: Synthetic oligonucleotide
ccauauaaacccuucuguaa

SEQ ID NO: 1262 - RNA, 20 nt, Artificial Sequence
  Description of Artificial Sequence: Synthetic oligonucleotide
aucaaguaugccauuacaga

SEQ ID NO: 1263 - RNA, 20 nt, Artificial Sequence
  Description of Artificial Sequence: Synthetic oligonucleotide
ucaaguaugccauuacagaa

SEQ ID NO: 1264 - RNA, 20 nt, Artificial Sequence
  Description of Artificial Sequence: Synthetic oligonucleotide
ccauuacagaaggguuuaua

SEQ ID NO: 1265 - RNA, 20 nt, Artificial Sequence
  Description of Artificial Sequence: Synthetic oligonucleotide
gaaggaugcaguagaguuuu

SEQ ID NO: 1266 - RNA, 20 nt, Artificial Sequence
  Description of Artificial Sequence: Synthetic oligonucleotide
gaugaaguguagaauauuuc

SEQ ID NO: 1267 - RNA, 20 nt, Artificial Sequence
  Description of Artificial Sequence: Synthetic oligonucleotide
aaauuuggacuucaaguguc

SEQ ID NO: 1268 - RNA, 20 nt, Artificial Sequence
  Description of Artificial Sequence: Synthetic oligonucleotide
uggacuucaagugucaggag

SEQ ID NO: 1269 - RNA, 20 nt, Artificial Sequence
  Description of Artificial Sequence: Synthetic oligonucleotide
caagugucaggaguggaacu

SEQ ID NO: 1270 - RNA, 20 nt, Artificial Sequence
  Description of Artificial Sequence: Synthetic oligonucleotide
aguucaagugucagaagauu

SEQ ID NO: 1271 - RNA, 20 nt, Artificial Sequence
  Description of Artificial Sequence: Synthetic oligonucleotide
aagcaccaaccccaccuuuc

SEQ ID NO: 1272 - RNA, 20 nt, Artificial Sequence
  Description of Artificial Sequence: Synthetic oligonucleotide
auuguagugccagaaaggug

SEQ ID NO: 1273 - RNA, 20 nt, Artificial Sequence
  Description of Artificial Sequence: Synthetic oligonucleotide
caauaaccaccaaaaugguu

SEQ ID NO: 1274 - RNA, 20 nt, Artificial Sequence
  Description of Artificial Sequence: Synthetic oligonucleotide
aauuauauccaagcuacuca

SEQ ID NO: 1275 - RNA, 20 nt, Artificial Sequence
  Description of Artificial Sequence: Synthetic oligonucleotide
aauuaguagaguaucuauaa

SEQ ID NO: 1276 - RNA, 20 nt, Artificial Sequence
  Description of Artificial Sequence: Synthetic oligonucleotide
caauuaguagaguaucuaua

SEQ ID NO: 1277 - RNA, 20 nt, Artificial Sequence
  Description of Artificial Sequence: Synthetic oligonucleotide
agaaauagccuaauucuugc

SEQ ID NO: 1278 - RNA, 20 nt, Artificial Sequence
  Description of Artificial Sequence: Synthetic oligonucleotide
uuauuauuccagcaagaauu

SEQ ID NO: 1279 - RNA, 20 nt, Artificial Sequence
  Description of Artificial Sequence: Synthetic oligonucleotide
ccgaucauuuuuuuguaugg

SEQ ID NO: 1280 - RNA, 20 nt, Artificial Sequence
  Description of Artificial Sequence: Synthetic oligonucleotide
cagccgaucauuuuuuugua

SEQ ID NO: 1281 - RNA, 20 nt, Artificial Sequence
  Description of Artificial Sequence: Synthetic oligonucleotide
cucugcauacuuagcacagu

SEQ ID NO: 1282 - RNA, 20 nt, Artificial Sequence
  Description of Artificial Sequence: Synthetic oligonucleotide
uuucacgcauaccucuccaa

SEQ ID NO: 1283 - RNA, 20 nt, Artificial Sequence
  Description of Artificial Sequence: Synthetic oligonucleotide
aaugcuaauuccaaaagccu

SEQ ID NO: 1284 - RNA, 20 nt, Artificial Sequence
  Description of Artificial Sequence: Synthetic oligonucleotide
uccaccuugcucccucuuuc

SEQ ID NO: 1285 - RNA, 20 nt, Artificial Sequence
  Description of Artificial Sequence: Synthetic oligonucleotide
agaacgcuagucuaagaugu

SEQ ID NO: 1286 - RNA, 20 nt, Artificial Sequence
  Description of Artificial Sequence: Synthetic oligonucleotide
uguuggaauuaacuuuguag

SEQ ID NO: 1287 - RNA, 20 nt, Artificial Sequence
  Description of Artificial Sequence: Synthetic oligonucleotide
uuggaauuaacuuuguagug

SEQ ID NO: 1288 - RNA, 20 nt, Artificial Sequence
  Description of Artificial Sequence: Synthetic oligonucleotide
cagugacauuaagaauguaa

SEQ ID NO: 1289 - RNA, 20 nt, Artificial Sequence
  Description of Artificial Sequence: Synthetic oligonucleotide
aggagggguacuagauguau

SEQ ID NO: 1290 - RNA, 20 nt, Artificial Sequence
  Description of Artificial Sequence: Synthetic oligonucleotide
uagauguauggguaauauua

SEQ ID NO: 1291 - RNA, 20 nt, Artificial Sequence
  Description of Artificial Sequence: Synthetic oligonucleotide
cucaagauuuuaaaucugag

SEQ ID NO: 1292 - RNA, 20 nt, Artificial Sequence
  Description of Artificial Sequence: Synthetic oligonucleotide
ucaagauuuuaaaucugagu

SEQ ID NO: 1293 - RNA, 20 nt, Artificial Sequence
  Description of Artificial Sequence: Synthetic oligonucleotide
agauuuuaaaucugaguggg

SEQ ID NO: 1294 - RNA, 20 nt, Artificial Sequence
  Description of Artificial Sequence: Synthetic oligonucleotide
uuuuaaaucugagugggagg

SEQ ID NO: 1295 - RNA, 20 nt, Artificial Sequence
  Description of Artificial Sequence: Synthetic oligonucleotide
agcagauugauuaacuguac

SEQ ID NO: 1296 - RNA, 20 nt, Artificial Sequence
  Description of Artificial Sequence: Synthetic oligonucleotide
ugcccuucuaccagacagca

SEQ ID NO: 1297 - RNA, 20 nt, Artificial Sequence
  Description of Artificial Sequence: Synthetic oligonucleotide
uaccaugcugucugguagaa

SEQ ID NO: 1298 - RNA, 20 nt, Artificial Sequence
  Description of Artificial Sequence: Synthetic oligonucleotide
acuuuguuauaguggauagc

SEQ ID NO: 1299 - RNA, 20 nt, Artificial Sequence
  Description of Artificial Sequence: Synthetic oligonucleotide
aaggugauacuuuguuauag

SEQ ID NO: 1300 - RNA, 20 nt, Artificial Sequence
  Description of Artificial Sequence: Synthetic oligonucleotide
gguccaugaaggcugcacau

SEQ ID NO: 1301 - RNA, 20 nt, Artificial Sequence
  Description of Artificial Sequence: Synthetic oligonucleotide
ugguucuagcugguccauga

SEQ ID NO: 1302 - RNA, 20 nt, Artificial Sequence
  Description of Artificial Sequence: Synthetic oligonucleotide
gagguaaagcaagucucguu

SEQ ID NO: 1303 - RNA, 20 nt, Artificial Sequence
  Description of Artificial Sequence: Synthetic oligonucleotide
aaguucuacagcagacugaa

SEQ ID NO: 1304 - RNA, 20 nt, Artificial Sequence
  Description of Artificial Sequence: Synthetic oligonucleotide
acuuacugauucaacaagug

SEQ ID NO: 1305 - RNA, 20 nt, Artificial Sequence
  Description of Artificial Sequence: Synthetic oligonucleotide
gcuacaaugguguaacucuu

SEQ ID NO: 1306 - RNA, 20 nt, Artificial Sequence
  Description of Artificial Sequence: Synthetic oligonucleotide
ugcugcucauugguuucaua

SEQ ID NO: 1307 - RNA, 20 nt, Artificial Sequence
  Description of Artificial Sequence: Synthetic oligonucleotide
auuaaaccaauaguaaugcu

SEQ ID NO: 1308 - RNA, 20 nt, Artificial Sequence
  Description of Artificial Sequence: Synthetic oligonucleotide
uaguuuccuagcauuacuau

SEQ ID NO: 1309 - RNA, 20 nt, Artificial Sequence
  Description of Artificial Sequence: Synthetic oligonucleotide
ggagggcaauuguuuaaacu

SEQ ID NO: 1310 - RNA, 20 nt, Artificial Sequence
  Description of Artificial Sequence: Synthetic oligonucleotide
caugccccccacugggggga

SEQ ID NO: 1311 - RNA, 20 nt, Artificial Sequence
  Description of Artificial Sequence: Synthetic oligonucleotide
ucaugccccccacugggggg

SEQ ID NO: 1312 - RNA, 20 nt, Artificial Sequence
  Description of Artificial Sequence: Synthetic oligonucleotide
acucucaugccccccacugg

SEQ ID NO: 1313 - RNA, 20 nt, Artificial Sequence
  Description of Artificial Sequence: Synthetic oligonucleotide
ugacucucaugccccccacu

SEQ ID NO: 1314 - RNA, 20 nt, Artificial Sequence
  Description of Artificial Sequence: Synthetic oligonucleotide
uugacucucaugccccccac

SEQ ID NO: 1315 - RNA, 20 nt, Artificial Sequence
  Description of Artificial Sequence: Synthetic oligonucleotide
cacaguaugcaagauuuacc

SEQ ID NO: 1316 - RNA, 20 nt, Artificial Sequence
  Description of Artificial Sequence: Synthetic oligonucleotide
cuugaaugcgguuuguaauc

SEQ ID NO: 1317 - RNA, 20 nt, Artificial Sequence
  Description of Artificial Sequence: Synthetic oligonucleotide
acaugccuuguuauauuaua

SEQ ID NO: 1318 - RNA, 20 nt, Artificial Sequence
  Description of Artificial Sequence: Synthetic oligonucleotide
cauuaccuaaaauuuagcuc

SEQ ID NO: 1319 - RNA, 20 nt, Artificial Sequence
  Description of Artificial Sequence: Synthetic oligonucleotide
aacacucagacuuucucuau

SEQ ID NO: 1320 - RNA, 20 nt, Artificial Sequence
  Description of Artificial Sequence: Synthetic oligonucleotide
acucagacuuucucuauugg

SEQ ID NO: 1321 - RNA, 20 nt, Artificial Sequence
  Description of Artificial Sequence: Synthetic oligonucleotide
cuauuggagguuagggcaaa

SEQ ID NO: 1322 - RNA, 20 nt, Artificial Sequence
  Description of Artificial Sequence: Synthetic oligonucleotide
agggcaaaaggauggcuuau

SEQ ID NO: 1323 - RNA, 20 nt, Artificial Sequence
  Description of Artificial Sequence: Synthetic oligonucleotide
guauuuaauuguagcuuagc

SEQ ID NO: 1324 - RNA, 20 nt, Artificial Sequence
  Description of Artificial Sequence: Synthetic oligonucleotide
uaucugaucaauaccauguu

SEQ ID NO: 1325 - RNA, 20 nt, Artificial Sequence
  Description of Artificial Sequence: Synthetic oligonucleotide
uggucgcaauggaucugauu

SEQ ID NO: 1326 - RNA, 20 nt, Artificial Sequence
  Description of Artificial Sequence: Synthetic oligonucleotide
gcacaaauccauggucgcaa

SEQ ID NO: 1327 - RNA, 20 nt, Artificial Sequence
  Description of Artificial Sequence: Synthetic oligonucleotide
aaucagauccauugcgacca

SEQ ID NO: 1328 - RNA, 20 nt, Artificial Sequence
  Description of Artificial Sequence: Synthetic oligonucleotide
aucuaaauggcacaaaucca

SEQ ID NO: 1329 - RNA, 20 nt, Artificial Sequence
  Description of Artificial Sequence: Synthetic oligonucleotide
auauuuaccuuaaauuagau

SEQ ID NO: 1330 - RNA, 20 nt, Artificial Sequence
  Description of Artificial Sequence: Synthetic oligonucleotide
ugugaguccuaucuaauuua

SEQ ID NO: 1331 - RNA, 20 nt, Artificial Sequence
  Description of Artificial Sequence: Synthetic oligonucleotide
cagaaauacggagauuuuag

SEQ ID NO: 1332 - RNA, 20 nt, Artificial Sequence
  Description of Artificial Sequence: Synthetic oligonucleotide
agaaauacggagauuuuaga

SEQ ID NO: 1333 - RNA, 20 nt, Artificial Sequence
  Description of Artificial Sequence: Synthetic oligonucleotide
auacggagauuuuagagggc

SEQ ID NO: 1334 - RNA, 20 nt, Artificial Sequence
  Description of Artificial Sequence: Synthetic oligonucleotide
acaaaagugguugauguuga

SEQ ID NO: 1335 - RNA, 20 nt, Artificial Sequence
  Description of Artificial Sequence: Synthetic oligonucleotide
gccguuuuauuaagcaaaau

SEQ ID NO: 1336 - RNA, 20 nt, Artificial Sequence
  Description of Artificial Sequence: Synthetic oligonucleotide
gccuauuuugcuuaauaaaa

SEQ ID NO: 1337 - RNA, 20 nt, Artificial Sequence
  Description of Artificial Sequence: Synthetic oligonucleotide
gcaaacguauuacuucuuug

SEQ ID NO: 1338 - RNA, 20 nt, Artificial Sequence
  Description of Artificial Sequence: Synthetic oligonucleotide
uacuggucagcugaguugau

SEQ ID NO: 1339 - RNA, 20 nt, Artificial Sequence
  Description of Artificial Sequence: Synthetic oligonucleotide
cacaacuacaaguggcuuac

SEQ ID NO: 1340 - RNA, 20 nt, Artificial Sequence
  Description of Artificial Sequence: Synthetic oligonucleotide
aacaauaucacaacuacaag

SEQ ID NO: 1341 - RNA, 20 nt, Artificial Sequence
  Description of Artificial Sequence: Synthetic oligonucleotide
uauaaacaggaauuagaggc

SEQ ID NO: 1342 - RNA, 20 nt, Artificial Sequence
  Description of Artificial Sequence: Synthetic oligonucleotide
uagaggggaugauuacuaaa

SEQ ID NO: 1343 - RNA, 20 nt, Artificial Sequence
  Description of Artificial Sequence: Synthetic oligonucleotide
uccacuauuucaaaguagag

SEQ ID NO: 1344 - RNA, 20 nt, Artificial Sequence
  Description of Artificial Sequence: Synthetic oligonucleotide
cuccacuauuucaaaguaga

SEQ ID NO: 1345 - RNA, 20 nt, Artificial Sequence
  Description of Artificial Sequence: Synthetic oligonucleotide
aauuauuaguccacaaggac

SEQ ID NO: 1346 - RNA, 20 nt, Artificial Sequence
  Description of Artificial Sequence: Synthetic oligonucleotide
uuuacaauuauuaguccaca

SEQ ID NO: 1347 - RNA, 20 nt, Artificial Sequence
  Description of Artificial Sequence: Synthetic oligonucleotide
uuuuuuucagucauugggag

SEQ ID NO: 1348 - RNA, 20 nt, Artificial Sequence
  Description of Artificial Sequence: Synthetic oligonucleotide
gaaguauaaagauacacauu

SEQ ID NO: 1349 - RNA, 20 nt, Artificial Sequence
  Description of Artificial Sequence: Synthetic oligonucleotide
auacuucaugccugacugua

SEQ ID NO: 1350 - RNA, 20 nt, Artificial Sequence
  Description of Artificial Sequence: Synthetic oligonucleotide
aacugauguugauaggagua

SEQ ID NO: 1351 - RNA, 20 nt, Artificial Sequence
  Description of Artificial Sequence: Synthetic oligonucleotide
auuuuaauacuguguagagu

SEQ ID NO: 1352 - RNA, 20 nt, Artificial Sequence
  Description of Artificial Sequence: Synthetic oligonucleotide
ucucucggcccauucaaaaa

SEQ ID NO: 1353 - RNA, 20 nt, Artificial Sequence
  Description of Artificial Sequence: Synthetic oligonucleotide
uugaaugggccgagagauug

SEQ ID NO: 1354 - RNA, 20 nt, Artificial Sequence
  Description of Artificial Sequence: Synthetic oligonucleotide
ugaaugggccgagagauuga

SEQ ID NO: 1355 - RNA, 20 nt, Artificial Sequence
  Description of Artificial Sequence: Synthetic oligonucleotide
gaaugggccgagagauugag

SEQ ID NO: 1356 - RNA, 20 nt, Artificial Sequence
  Description of Artificial Sequence: Synthetic oligonucleotide
auuuaugauaguagauacuc

SEQ ID NO: 1357 - RNA, 20 nt, Artificial Sequence
  Description of Artificial Sequence: Synthetic oligonucleotide
gacuuugcaaauagcagccc

SEQ ID NO: 1358 - RNA, 20 nt, Artificial Sequence
  Description of Artificial Sequence: Synthetic oligonucleotide
ccaacuuacacagucacaua

SEQ ID NO: 1359 - RNA, 20 nt, Artificial Sequence
  Description of Artificial Sequence: Synthetic oligonucleotide
uccaacuuacacagucacau

SEQ ID NO: 1360 - RNA, 20 nt, Artificial Sequence
  Description of Artificial Sequence: Synthetic oligonucleotide
gccuaggagaccagcuucau

SEQ ID NO: 1361 - RNA, 20 nt, Artificial Sequence
  Description of Artificial Sequence: Synthetic oligonucleotide
ugccuaggagaccagcuuca

SEQ ID NO: 1362 - RNA, 20 nt, Artificial Sequence
  Description of Artificial Sequence: Synthetic oligonucleotide
ucuuucuguacaaagugccu

SEQ ID NO: 1363 - RNA, 20 nt, Artificial Sequence
  Description of Artificial Sequence: Synthetic oligonucleotide
aacuuuggcuucucagcaau

SEQ ID NO: 1364 - RNA, 20 nt, Artificial Sequence
  Description of Artificial Sequence: Synthetic oligonucleotide
gcuuguguaaaacaggaaug

SEQ ID NO: 1365 - RNA, 20 nt, Artificial Sequence
  Description of Artificial Sequence: Synthetic oligonucleotide
agcuuguguaaaacaggaau

SEQ ID NO: 1366 - RNA, 20 nt, Artificial Sequence
  Description of Artificial Sequence: Synthetic oligonucleotide
uagcuuguguaaaacaggaa

SEQ ID NO: 1367 - RNA, 20 nt, Artificial Sequence
  Description of Artificial Sequence: Synthetic oligonucleotide
caugcuagcuuguguaaaac

SEQ ID NO: 1368 - RNA, 20 nt, Artificial Sequence
  Description of Artificial Sequence: Synthetic oligonucleotide
gcagucuuuuuauaugcuug

SEQ ID NO: 1369 - RNA, 20 nt, Artificial Sequence
  Description of Artificial Sequence: Synthetic oligonucleotide
uuggggcuuaugaaccuuga

SEQ ID NO: 1370 - RNA, 20 nt, Artificial Sequence
  Description of Artificial Sequence: Synthetic oligonucleotide
agaggaugcacacaugccaa

SEQ ID NO: 1371 - RNA, 20 nt, Artificial Sequence
  Description of Artificial Sequence: Synthetic oligonucleotide
gcuggaggucgugcuggcag

SEQ ID NO: 1372 - RNA, 20 nt, Artificial Sequence
  Description of Artificial Sequence: Synthetic oligonucleotide
uauuaaaaaguuggugcugg

SEQ ID NO: 1373 - RNA, 20 nt, Artificial Sequence
  Description of Artificial Sequence: Synthetic oligonucleotide
ggaauaaacaugacacgaac

SEQ ID NO: 1374 - RNA, 20 nt, Artificial Sequence
  Description of Artificial Sequence: Synthetic oligonucleotide
uuggccuguguuaaguuugg

SEQ ID NO: 1375 - RNA, 20 nt, Artificial Sequence
  Description of Artificial Sequence: Synthetic oligonucleotide
ugguuggccuguguuaaguu

SEQ ID NO: 1376 - RNA, 20 nt, Artificial Sequence
  Description of Artificial Sequence: Synthetic oligonucleotide
aaauuuucuucccucucgua

SEQ ID NO: 1377 - RNA, 20 nt, Artificial Sequence
  Description of Artificial Sequence: Synthetic oligonucleotide
gcacaguauaccccuacgag

SEQ ID NO: 1378 - RNA, 20 nt, Artificial Sequence
  Description of Artificial Sequence: Synthetic oligonucleotide
aauuuucuucccucucguag

SEQ ID NO: 1379 - RNA, 20 nt, Artificial Sequence
  Description of Artificial Sequence: Synthetic oligonucleotide
guaucuauacccaaaguaag

SEQ ID NO: 1380 - RNA, 20 nt, Artificial Sequence
  Description of Artificial Sequence: Synthetic oligonucleotide
guauacugugccucuuacuu

SEQ ID NO: 1381 - RNA, 20 nt, Artificial Sequence
  Description of Artificial Sequence: Synthetic oligonucleotide
cuaggacaaagugaaacaac

SEQ ID NO: 1382 - RNA, 20 nt, Artificial Sequence
  Description of Artificial Sequence: Synthetic oligonucleotide
agacuuuuaaguuauugggc

SEQ ID NO: 1383 - RNA, 20 nt, Artificial Sequence
  Description of Artificial Sequence: Synthetic oligonucleotide
uacaaauaaaaauacuucgg

SEQ ID NO: 1384 - RNA, 20 nt, Artificial Sequence
  Description of Artificial Sequence: Synthetic oligonucleotide
ggcgaauguuaauuuaguua

SEQ ID NO: 1385 - RNA, 20 nt, Artificial Sequence
  Description of Artificial Sequence: Synthetic oligonucleotide
uugggucauuuauaucguga

SEQ ID NO: 1386 - RNA, 20 nt, Artificial Sequence
  Description of Artificial Sequence: Synthetic oligonucleotide
uuauuugcuuugcaccaauc

SEQ ID NO: 1387 - RNA, 20 nt, Artificial Sequence
  Description of Artificial Sequence: Synthetic oligonucleotide
gccaaagcacuaaaccagau

SEQ ID NO: 1388 - RNA, 20 nt, Artificial Sequence
  Description of Artificial Sequence: Synthetic oligonucleotide
accaaucugguuuagugcuu

SEQ ID NO: 1389 - RNA, 20 nt, Artificial Sequence
  Description of Artificial Sequence: Synthetic oligonucleotide
uuggcauguuguugucguca

SEQ ID NO: 1390 - RNA, 20 nt, Artificial Sequence
  Description of Artificial Sequence: Synthetic oligonucleotide
guuguugucgucauggucau

SEQ ID NO: 1391 - RNA, 20 nt, Artificial Sequence
  Description of Artificial Sequence: Synthetic oligonucleotide
guauucauagcauagcagug

SEQ ID NO: 1392 - RNA, 20 nt, Artificial Sequence
  Description of Artificial Sequence: Synthetic oligonucleotide
ggagaauaaauugagcugua

SEQ ID NO: 1393 - RNA, 20 nt, Artificial Sequence
  Description of Artificial Sequence: Synthetic oligonucleotide
uccuaagauuacuauucggu

SEQ ID NO: 1394 - RNA, 20 nt, Artificial Sequence
  Description of Artificial Sequence: Synthetic oligonucleotide
uuccuaagauuacuauucgg

SEQ ID NO: 1395 - RNA, 20 nt, Artificial Sequence
  Description of Artificial Sequence: Synthetic oligonucleotide
accuuccuaagauuacuauu

SEQ ID NO: 1396 - RNA, 20 nt, Artificial Sequence
  Description of Artificial Sequence: Synthetic oligonucleotide
gcccaccgaauaguaaucuu

SEQ ID NO: 1397 - RNA, 20 nt, Artificial Sequence
  Description of Artificial Sequence: Synthetic oligonucleotide
accgaauaguaaucuuagga

SEQ ID NO: 1398 - RNA, 20 nt, Artificial Sequence
  Description of Artificial Sequence: Synthetic oligonucleotide
uuagugaccaaaaaacucca

SEQ ID NO: 1399 - RNA, 20 nt, Artificial Sequence
  Description of Artificial Sequence: Synthetic oligonucleotide
uuguguaacaguuaucuauu

SEQ ID NO: 1400 - RNA, 20 nt, Artificial Sequence
  Description of Artificial Sequence: Synthetic oligonucleotide
guuuuguucuggacuguacc

SEQ ID NO: 1401 - RNA, 20 nt, Artificial Sequence
  Description of Artificial Sequence: Synthetic oligonucleotide
uauaggauccucuacauaaa

SEQ ID NO: 1402 - RNA, 20 nt, Artificial Sequence
  Description of Artificial Sequence: Synthetic oligonucleotide
uauuaaaacugcacaaaaag

SEQ ID NO: 1403 - RNA, 20 nt, Artificial Sequence
  Description of Artificial Sequence: Synthetic oligonucleotide
gugauacugcccauaccuuu

SEQ ID NO: 1404 - RNA, 20 nt, Artificial Sequence
  Description of Artificial Sequence: Synthetic oligonucleotide
aacagauuuucccaaaggua

SEQ ID NO: 1405 - RNA, 20 nt, Artificial Sequence
  Description of Artificial Sequence: Synthetic oligonucleotide
ugugauacugcccauaccuu

SEQ ID NO: 1406 - RNA, 20 nt, Artificial Sequence
  Description of Artificial Sequence: Synthetic oligonucleotide
augggcaguaucacaggagu

SEQ ID NO: 1407 - RNA, 20 nt, Artificial Sequence
  Description of Artificial Sequence: Synthetic oligonucleotide
uauuaaaaaucugggaacuu

SEQ ID NO: 1408 - RNA, 20 nt, Artificial Sequence
  Description of Artificial Sequence: Synthetic oligonucleotide
aacccagggcuccaaaguua

SEQ ID NO: 1409 - RNA, 20 nt, Artificial Sequence
  Description of Artificial Sequence: Synthetic oligonucleotide
agauucuguaaccuuaacuu

SEQ ID NO: 1410 - RNA, 20 nt, Artificial Sequence
  Description of Artificial Sequence: Synthetic oligonucleotide
uaaccuuaacuuuggagccc

SEQ ID NO: 1411 - RNA, 20 nt, Artificial Sequence
  Description of Artificial Sequence: Synthetic oligonucleotide
augauugaucagucauaagc

SEQ ID NO: 1412 - RNA, 20 nt, Artificial Sequence
  Description of Artificial Sequence: Synthetic oligonucleotide
acucauugcuacaaaaauga

SEQ ID NO: 1413 - RNA, 20 nt, Artificial Sequence
  Description of Artificial Sequence: Synthetic oligonucleotide
cuguggaaacucuuaaguuu

SEQ ID NO: 1414 - RNA, 20 nt, Artificial Sequence
  Description of Artificial Sequence: Synthetic oligonucleotide
uuuugaugcuuuauggacug

SEQ ID NO: 1415 - RNA, 20 nt, Artificial Sequence
  Description of Artificial Sequence: Synthetic oligonucleotide
uuauggcuuuugaugcuuua

SEQ ID NO: 1416 - RNA, 20 nt, Artificial Sequence
  Description of Artificial Sequence: Synthetic oligonucleotide
ucacagaauguuaauguuag

SEQ ID NO: 1417 - RNA, 20 nt, Artificial Sequence
  Description of Artificial Sequence: Synthetic oligonucleotide
ucuuacuuugaugagcuugc

SEQ ID NO: 1418 - RNA, 20 nt, Artificial Sequence
  Description of Artificial Sequence: Synthetic oligonucleotide
uugguguaucauaagauuac

SEQ ID NO: 1419 - RNA, 20 nt, Artificial Sequence
  Description of Artificial Sequence: Synthetic oligonucleotide
uguguuaggcagaauagagc

SEQ ID NO: 1420 - RNA, 20 nt, Artificial Sequence
  Description of Artificial Sequence: Synthetic oligonucleotide
caaggauccaucuuuacaga

SEQ ID NO: 1421 - RNA, 20 nt, Artificial Sequence
  Description of Artificial Sequence: Synthetic oligonucleotide
uacacuagaaauagaguuca

SEQ ID NO: 1422 - RNA, 20 nt, Artificial Sequence
  Description of Artificial Sequence: Synthetic oligonucleotide
auacacuagaaauagaguuc

SEQ ID NO: 1423 - RNA, 20 nt, Artificial Sequence
  Description of Artificial Sequence: Synthetic oligonucleotide
gauugcucaccaaagcgauu

SEQ ID NO: 1424 - RNA, 20 nt, Artificial Sequence
  Description of Artificial Sequence: Synthetic oligonucleotide
caccaaagcgauuaggaaaa

SEQ ID NO: 1425 - RNA, 20 nt, Artificial Sequence
  Description of Artificial Sequence: Synthetic oligonucleotide
ccuuaugcuuuguacccagu

SEQ ID NO: 1426 - RNA, 20 nt, Artificial Sequence
  Description of Artificial Sequence: Synthetic oligonucleotide
ccuacuggguacaaagcaua

SEQ ID NO: 1427 - RNA, 20 nt, Artificial Sequence
  Description of Artificial Sequence: Synthetic oligonucleotide
ccuaguuucuguacauaagc

SEQ ID NO: 1428 - RNA, 20 nt, Artificial Sequence
  Description of Artificial Sequence: Synthetic oligonucleotide
guuucuguacauaagcuggc

SEQ ID NO: 1429 - RNA, 20 nt, Artificial Sequence
  Description of Artificial Sequence: Synthetic oligonucleotide
cuggucagugauuuauaucu

SEQ ID NO: 1430 - RNA, 20 nt, Artificial Sequence
  Description of Artificial Sequence: Synthetic oligonucleotide
aaugaugcacaauguuguac

SEQ ID NO: 1431 - RNA, 20 nt, Artificial Sequence
  Description of Artificial Sequence: Synthetic oligonucleotide
guuuuacuccuauuuaauac

SEQ ID NO: 1432 - RNA, 20 nt, Artificial Sequence
  Description of Artificial Sequence: Synthetic oligonucleotide
gaacuacuagaagucaaguu

SEQ ID NO: 1433 - RNA, 20 nt, Artificial Sequence
  Description of Artificial Sequence: Synthetic oligonucleotide
cuuuugaauaggcaggugac

SEQ ID NO: 1434 - RNA, 20 nt, Artificial Sequence
  Description of Artificial Sequence: Synthetic oligonucleotide
caguggcuucaaugagauuu

SEQ ID NO: 1435 - RNA, 20 nt, Artificial Sequence
  Description of Artificial Sequence: Synthetic oligonucleotide
gacuaaggaacuauguuuac

SEQ ID NO: 1436 - RNA, 20 nt, Artificial Sequence
  Description of Artificial Sequence: Synthetic oligonucleotide
uguagggauccaagggggga

SEQ ID NO: 1437 - RNA, 20 nt, Artificial Sequence
  Description of Artificial Sequence: Synthetic oligonucleotide
cauuuguaucccuccccccu

SEQ ID NO: 1438 - RNA, 20 nt, Artificial Sequence
  Description of Artificial Sequence: Synthetic oligonucleotide
uuaucuguagggauccaagg

SEQ ID NO: 1439 - RNA, 20 nt, Artificial Sequence
  Description of Artificial Sequence: Synthetic oligonucleotide
aauuuaucuguagggaucca

SEQ ID NO: 1440 - RNA, 20 nt, Artificial Sequence
  Description of Artificial Sequence: Synthetic oligonucleotide
aagguaagaauuuaucugua

SEQ ID NO: 1441 - RNA, 20 nt, Artificial Sequence
  Description of Artificial Sequence: Synthetic oligonucleotide
ggucaauuagcaggaagaga

SEQ ID NO: 1442 - RNA, 20 nt, Artificial Sequence
  Description of Artificial Sequence: Synthetic oligonucleotide
cuaauugaccagcagcaccc

SEQ ID NO: 1443 - RNA, 20 nt, Artificial Sequence
  Description of Artificial Sequence: Synthetic oligonucleotide
aaagggaugauagcaaucca

SEQ ID NO: 1444 - RNA, 20 nt, Artificial Sequence
  Description of Artificial Sequence: Synthetic oligonucleotide
gauagcacauaacauuuuau

SEQ ID NO: 1445 - RNA, 20 nt, Artificial Sequence
  Description of Artificial Sequence: Synthetic oligonucleotide
gguuguuuuagaauaaauaa

SEQ ID NO: 1446 - RNA, 20 nt, Artificial Sequence
  Description of Artificial Sequence: Synthetic oligonucleotide
aucucacguaaguuuacaau

SEQ ID NO: 1447 - RNA, 20 nt, Artificial Sequence
  Description of Artificial Sequence: Synthetic oligonucleotide
uaaacuuacgugagauaaua

SEQ ID NO: 1448 - RNA, 20 nt, Artificial Sequence
  Description of Artificial Sequence: Synthetic oligonucleotide
uagcucuuaaaauuguaugc

SEQ ID NO: 1449 - RNA, 20 nt, Artificial Sequence
  Description of Artificial Sequence: Synthetic oligonucleotide
gaaaacuucguaagggaaua

SEQ ID NO: 1450 - RNA, 20 nt, Artificial Sequence
  Description of Artificial Sequence: Synthetic oligonucleotide
auacuuggaaaacuucguaa

SEQ ID NO: 1451 - RNA, 20 nt, Artificial Sequence
  Description of Artificial Sequence: Synthetic oligonucleotide
uauacuuggaaaacuucgua

SEQ ID NO: 1452 - RNA, 20 nt, Artificial Sequence
  Description of Artificial Sequence: Synthetic oligonucleotide
aguauagaagaccuacuuaa

SEQ ID NO: 1453 - RNA, 20 nt, Artificial Sequence
  Description of Artificial Sequence: Synthetic oligonucleotide
uucucaguucuaguuuggug

SEQ ID NO: 1454 - RNA, 20 nt, Artificial Sequence
  Description of Artificial Sequence: Synthetic oligonucleotide
auuauuugaaaaggcaguau

SEQ ID NO: 1455 - RNA, 20 nt, Artificial Sequence
  Description of Artificial Sequence: Synthetic oligonucleotide
auauuaucuguacuguacag

SEQ ID NO: 1456 - RNA, 20 nt, Artificial Sequence
  Description of Artificial Sequence: Synthetic oligonucleotide
cuuacaaucuaaggcuaaaa

SEQ ID NO: 1457 - RNA, 20 nt, Artificial Sequence
  Description of Artificial Sequence: Synthetic oligonucleotide
uaaaccucgucagcaccaug

SEQ ID NO: 1458 - RNA, 20 nt, Artificial Sequence
  Description of Artificial Sequence: Synthetic oligonucleotide
gucuugaguucucgcuuauu

SEQ ID NO: 1459 - RNA, 20 nt, Artificial Sequence
  Description of Artificial Sequence: Synthetic oligonucleotide
gaagaaggcgugacuaugag

SEQ ID NO: 1460 - RNA, 20 nt, Artificial Sequence
  Description of Artificial Sequence: Synthetic oligonucleotide
ccaguuuagcauuccuuaaa

SEQ ID NO: 1461 - RNA, 20 nt, Artificial Sequence
  Description of Artificial Sequence: Synthetic oligonucleotide
ccauuuaaggaaugcuaaac

SEQ ID NO: 1462 - RNA, 20 nt, Artificial Sequence
  Description of Artificial Sequence: Synthetic oligonucleotide
aaggaaugcuaaacugggga

SEQ ID NO: 1463 - RNA, 20 nt, Artificial Sequence
  Description of Artificial Sequence: Synthetic oligonucleotide
ccaguaaucuuuguauaggu

SEQ ID NO: 1464 - RNA, 20 nt, Artificial Sequence
  Description of Artificial Sequence: Synthetic oligonucleotide
aacuccaguaaucuuuguau

SEQ ID NO: 1465 - RNA, 20 nt, Artificial Sequence
  Description of Artificial Sequence: Synthetic oligonucleotide
cccaccuauacaaagauuac

SEQ ID NO: 1466 - RNA, 20 nt, Artificial Sequence
  Description of Artificial Sequence: Synthetic oligonucleotide
acaaggguccucgaaagacu

SEQ ID NO: 1467 - RNA, 20 nt, Artificial Sequence
  Description of Artificial Sequence: Synthetic oligonucleotide
uuuuguggccuagucuuucg

SEQ ID NO: 1468 - RNA, 20 nt, Artificial Sequence
  Description of Artificial Sequence: Synthetic oligonucleotide
ccagucuuccugaacagaca

SEQ ID NO: 1469 - RNA, 20 nt, Artificial Sequence
  Description of Artificial Sequence: Synthetic oligonucleotide
ucgaggacccuugucuguuc

SEQ ID NO: 1470 - RNA, 20 nt, Artificial Sequence
  Description of Artificial Sequence: Synthetic oligonucleotide
uuguaaacgcuaaucuucca

SEQ ID NO: 1471 - RNA, 20 nt, Artificial Sequence
  Description of Artificial Sequence: Synthetic oligonucleotide
aacgcuaaucuuccacggac

SEQ ID NO: 1472 - RNA, 20 nt, Artificial Sequence
  Description of Artificial Sequence: Synthetic oligonucleotide
aaucuuccacggacuggagc

SEQ ID NO: 1473 - RNA, 20 nt, Artificial Sequence
  Description of Artificial Sequence: Synthetic oligonucleotide
cgaagcagcuucauagaacc

SEQ ID NO: 1474 - RNA, 20 nt, Artificial Sequence
  Description of Artificial Sequence: Synthetic oligonucleotide
auucaaacuggcuauuuaaa

SEQ ID NO: 1475 - RNA, 20 nt, Artificial Sequence
  Description of Artificial Sequence: Synthetic oligonucleotide
uauaaacagauaauuuaaug

SEQ ID NO: 1476 - RNA, 20 nt, Artificial Sequence
  Description of Artificial Sequence: Synthetic oligonucleotide
cuguuuauaaauacuaaagc

SEQ ID NO: 1477 - RNA, 20 nt, Artificial Sequence
  Description of Artificial Sequence: Synthetic oligonucleotide
auacuaaagcaggaaaaugg

SEQ ID NO: 1478 - RNA, 20 nt, Artificial Sequence
  Description of Artificial Sequence: Synthetic oligonucleotide
cauuaauaaacuguugcaca

SEQ ID NO: 1479 - RNA, 20 nt, Artificial Sequence
  Description of Artificial Sequence: Synthetic oligonucleotide
uuuucuaugcaagucuugug

SEQ ID NO: 1480 - RNA, 20 nt, Artificial Sequence
  Description of Artificial Sequence: Synthetic oligonucleotide
uaaauuuagucagcgguucu

SEQ ID NO: 1481 - RNA, 20 nt, Artificial Sequence
  Description of Artificial Sequence: Synthetic oligonucleotide
ugacuaaauuuacucaaauu

SEQ ID NO: 1482 - RNA, 20 nt, Artificial Sequence
  Description of Artificial Sequence: Synthetic oligonucleotide
ugagacuguucacucaaaua

SEQ ID NO: 1483 - RNA, 20 nt, Artificial Sequence
  Description of Artificial Sequence: Synthetic oligonucleotide
aucuuuguugacaaaguagg

SEQ ID NO: 1484 - RNA, 20 nt, Artificial Sequence
  Description of Artificial Sequence: Synthetic oligonucleotide
agcaucuuuguugacaaagu

SEQ ID NO: 1485 - RNA, 20 nt, Artificial Sequence
  Description of Artificial Sequence: Synthetic oligonucleotide
auuugacaugcuuacaggac

SEQ ID NO: 1486 - RNA, 20 nt, Artificial Sequence
  Description of Artificial Sequence: Synthetic oligonucleotide
ccauacuacaugaaauaaaa

SEQ ID NO: 1487 - RNA, 20 nt, Artificial Sequence
  Description of Artificial Sequence: Synthetic oligonucleotide
cuaauacuauaguugaacca

SEQ ID NO: 1488 - RNA, 20 nt, Artificial Sequence
  Description of Artificial Sequence: Synthetic oligonucleotide
cugguaaggagauauaccau

SEQ ID NO: 1489 - RNA, 20 nt, Artificial Sequence
  Description of Artificial Sequence: Synthetic oligonucleotide
cucugucuagccgcagacgu

SEQ ID NO: 1490 - RNA, 20 nt, Artificial Sequence
  Description of Artificial Sequence: Synthetic oligonucleotide
aucucaaaagcuucuaugaa

SEQ ID NO: 1491 - RNA, 20 nt, Artificial Sequence
  Description of Artificial Sequence: Synthetic oligonucleotide
gcaacugaauuguaauacug

SEQ ID NO: 1492 - RNA, 20 nt, Artificial Sequence
  Description of Artificial Sequence: Synthetic oligonucleotide
uucagaacucagccaugauc

SEQ ID NO: 1493 - RNA, 20 nt, Artificial Sequence
  Description of Artificial Sequence: Synthetic oligonucleotide
cugagaauguccaauuuuaa

SEQ ID NO: 1494 - RNA, 20 nt, Artificial Sequence
  Description of Artificial Sequence: Synthetic oligonucleotide
auuugcagucaaugggggag

SEQ ID NO: 1495 - RNA, 20 nt, Artificial Sequence
  Description of Artificial Sequence: Synthetic oligonucleotide
uauauauuugcagucaaugg

SEQ ID NO: 1496 - RNA, 20 nt, Artificial Sequence
  Description of Artificial Sequence: Synthetic oligonucleotide
acauuuguguaaaugaagac

SEQ ID NO: 1497 - RNA, 20 nt, Artificial Sequence
  Description of Artificial Sequence: Synthetic oligonucleotide
cucgaagucauacaguucuu

SEQ ID NO: 1498 - RNA, 20 nt, Artificial Sequence
  Description of Artificial Sequence: Synthetic oligonucleotide
caaugagacaaagaggagua

SEQ ID NO: 1499 - RNA, 20 nt, Artificial Sequence
  Description of Artificial Sequence: Synthetic oligonucleotide
cuuacuccucuuugucucau

SEQ ID NO: 1500 - RNA, 20 nt, Artificial Sequence
  Description of Artificial Sequence: Synthetic oligonucleotide
uuacuccucuuugucucauu

SEQ ID NO: 1501 - RNA, 20 nt, Artificial Sequence
  Description of Artificial Sequence: Synthetic oligonucleotide
uuagucaaauauuuguuguu

SEQ ID NO: 1502 - RNA, 20 nt, Artificial Sequence
  Description of Artificial Sequence: Synthetic oligonucleotide
ucuacguuugcuguugcuga

SEQ ID NO: 1503 - RNA, 20 nt, Artificial Sequence
  Description of Artificial Sequence: Synthetic oligonucleotide
cucaagauguuauugacauu

SEQ ID NO: 1504 - RNA, 20 nt, Artificial Sequence
  Description of Artificial Sequence: Synthetic oligonucleotide
auaacaucuugaggguuugg

SEQ ID NO: 1505 - RNA, 20 nt, Artificial Sequence
  Description of Artificial Sequence: Synthetic oligonucleotide
uaaugacagcuguacaacua

SEQ ID NO: 1506 - RNA, 20 nt, Artificial Sequence
  Description of Artificial Sequence: Synthetic oligonucleotide
agaguucuugagaaaucuac

SEQ ID NO: 1507 - RNA, 20 nt, Artificial Sequence
  Description of Artificial Sequence: Synthetic oligonucleotide
acucaguguuucucugcccc

SEQ ID NO: 1508 - RNA, 20 nt, Artificial Sequence
  Description of Artificial Sequence: Synthetic oligonucleotide
aagacuucaccacaggaucc

SEQ ID NO: 1509 - RNA, 20 nt, Artificial Sequence
  Description of Artificial Sequence: Synthetic oligonucleotide
uuuuaacaagacuucaccac

SEQ ID NO: 1510 - RNA, 20 nt, Artificial Sequence
  Description of Artificial Sequence: Synthetic oligonucleotide
aaaauuuccagaacccucua

SEQ ID NO: 1511 - RNA, 20 nt, Artificial Sequence
  Description of Artificial Sequence: Synthetic oligonucleotide
auaagaagcaugugagaugc

SEQ ID NO: 1512 - RNA, 20 nt, Artificial Sequence
  Description of Artificial Sequence: Synthetic oligonucleotide
cugcauuacugaaagugucg

SEQ ID NO: 1513 - RNA, 20 nt, Artificial Sequence
  Description of Artificial Sequence: Synthetic oligonucleotide
ugcuccaguuugacucucug

SEQ ID NO: 1514 - RNA, 20 nt, Artificial Sequence
  Description of Artificial Sequence: Synthetic oligonucleotide
gcaaaccucggccaccuuuc

SEQ ID NO: 1515 - RNA, 20 nt, Artificial Sequence
  Description of Artificial Sequence: Synthetic oligonucleotide
caaaccucggccaccuuuca

SEQ ID NO: 1516 - RNA, 20 nt, Artificial Sequence
  Description of Artificial Sequence: Synthetic oligonucleotide
gucacacuugaugcuuugcc

SEQ ID NO: 1517 - RNA, 20 nt, Artificial Sequence
  Description of Artificial Sequence: Synthetic oligonucleotide
caacuguggaguaauggcag

SEQ ID NO: 1518 - RNA, 20 nt, Artificial Sequence
  Description of Artificial Sequence: Synthetic oligonucleotide
auauuugccaaucacaacug

SEQ ID NO: 1519 - RNA, 20 nt, Artificial Sequence
  Description of Artificial Sequence: Synthetic oligonucleotide
gugaucguggaacucaaacc

SEQ ID NO: 1520 - RNA, 20 nt, Artificial Sequence
  Description of Artificial Sequence: Synthetic oligonucleotide
ugaucguggaacucaaaccu

SEQ ID NO: 1521 - RNA, 20 nt, Artificial Sequence
  Description of Artificial Sequence: Synthetic oligonucleotide
cccaagcacuaggcaugccu

SEQ ID NO: 1522 - RNA, 20 nt, Artificial Sequence
  Description of Artificial Sequence: Synthetic oligonucleotide
gccuaggcaugccuagugcu

SEQ ID NO: 1523 - RNA, 20 nt, Artificial Sequence
  Description of Artificial Sequence: Synthetic oligonucleotide
ccuaggcaugccuagugcuu

SEQ ID NO: 1524 - RNA, 20 nt, Artificial Sequence
  Description of Artificial Sequence: Synthetic oligonucleotide
gcuugggucuugcagaguuu

SEQ ID NO: 1525 - RNA, 20 nt, Artificial Sequence
  Description of Artificial Sequence: Synthetic oligonucleotide
aguuugggcaccaccauauu

SEQ ID NO: 1526 - RNA, 20 nt, Artificial Sequence
  Description of Artificial Sequence: Synthetic oligonucleotide
ugaccuaaucacucccaagg

SEQ ID NO: 1527 - RNA, 20 nt, Artificial Sequence
  Description of Artificial Sequence: Synthetic oligonucleotide
gagugauuaggucagcgcug

SEQ ID NO: 1528 - RNA, 20 nt, Artificial Sequence
  Description of Artificial Sequence: Synthetic oligonucleotide
agugauuaggucagcgcugg

SEQ ID NO: 1529 - RNA, 20 nt, Artificial Sequence
  Description of Artificial Sequence: Synthetic oligonucleotide
gauuaggucagcgcuggggg

SEQ ID NO: 1530 - RNA, 20 nt, Artificial Sequence
  Description of Artificial Sequence: Synthetic oligonucleotide
aacagugcaccacuguucuc

SEQ ID NO: 1531 - RNA, 20 nt, Artificial Sequence
  Description of Artificial Sequence: Synthetic oligonucleotide
gcugcccucguuugucuaau

SEQ ID NO: 1532 - RNA, 20 nt, Artificial Sequence
  Description of Artificial Sequence: Synthetic oligonucleotide
cuccucgcuggccacccccg

SEQ ID NO: 1533 - RNA, 20 nt, Artificial Sequence
  Description of Artificial Sequence: Synthetic oligonucleotide
uucccgccucugccgggcug

SEQ ID NO: 1534 - RNA, 20 nt, Artificial Sequence
  Description of Artificial Sequence: Synthetic oligonucleotide
ggcccgcagcccggcagagg

SEQ ID NO: 1535 - RNA, 20 nt, Artificial Sequence
  Description of Artificial Sequence: Synthetic oligonucleotide
aaagcagcgcgccugcgccg

SEQ ID NO: 1536 - RNA, 20 nt, Artificial Sequence
  Description of Artificial Sequence: Synthetic oligonucleotide
agccccgguucccacggcgc

SEQ ID NO: 1537 - RNA, 20 nt, Artificial Sequence
  Description of Artificial Sequence: Synthetic oligonucleotide
aagcagcgcgccugcgccgu

SEQ ID NO: 1538 - RNA, 20 nt, Artificial Sequence
  Description of Artificial Sequence: Synthetic oligonucleotide
ugcgccgugggaaccggggc

SEQ ID NO: 1539 - RNA, 20 nt, Artificial Sequence
  Description of Artificial Sequence: Synthetic oligonucleotide
ccgcuuuucgccuccagccc

SEQ ID NO: 1540 - RNA, 20 nt, Artificial Sequence
  Description of Artificial Sequence: Synthetic oligonucleotide
gccgugggaaccggggcugg

SEQ ID NO: 1541 - RNA, 20 nt, Artificial Sequence
  Description of Artificial Sequence: Synthetic oligonucleotide
ccggggcuggaggcgaaaag

SEQ ID NO: 1542 - RNA, 20 nt, Artificial Sequence
  Description of Artificial Sequence: Synthetic oligonucleotide
uggaggcgaaaagcggggag

SEQ ID NO: 1543 - RNA, 20 nt, Artificial Sequence
  Description of Artificial Sequence: Synthetic oligonucleotide
aggcgaaaagcggggagcgg

SEQ ID NO: 1544 - RNA, 20 nt, Artificial Sequence
  Description of Artificial Sequence: Synthetic oligonucleotide
ggcgaaaagcggggagcgga

SEQ ID NO: 1545 - RNA, 20 nt, Artificial Sequence
  Description of Artificial Sequence: Synthetic oligonucleotide
gcgaaaagcggggagcggag

SEQ ID NO: 1546 - RNA, 20 nt, Artificial Sequence
  Description of Artificial Sequence: Synthetic oligonucleotide
cgaaaagcggggagcggagg

SEQ ID NO: 1547 - RNA, 20 nt, Artificial Sequence
  Description of Artificial Sequence: Synthetic oligonucleotide
guacagagcggcgugugacg

SEQ ID NO: 1548 - RNA, 20 nt, Artificial Sequence
  Description of Artificial Sequence: Synthetic oligonucleotide
ggggcgacguugggagcacg

SEQ ID NO: 1549 - RNA, 20 nt, Artificial Sequence
  Description of Artificial Sequence: Synthetic oligonucleotide
gcaccaaacugugaguuuca

SEQ ID NO: 1550 - RNA, 20 nt, Artificial Sequence
  Description of Artificial Sequence: Synthetic oligonucleotide
cagauucgcugggacccgag

SEQ ID NO: 1551 - RNA, 20 nt, Artificial Sequence
  Description of Artificial Sequence: Synthetic oligonucleotide
cagaggcccgaaacccacuc

SEQ ID NO: 1552 - RNA, 20 nt, Artificial Sequence
  Description of Artificial Sequence: Synthetic oligonucleotide
gcugggacccgaguggguuu

SEQ ID NO: 1553 - RNA, 20 nt, Artificial Sequence
  Description of Artificial Sequence: Synthetic oligonucleotide
uguggcagcggcgggacuga

SEQ ID NO: 1554 - RNA, 20 nt, Artificial Sequence
  Description of Artificial Sequence: Synthetic oligonucleotide
aggguggcggaagaacuugg

SEQ ID NO: 1555 - RNA, 20 nt, Artificial Sequence
  Description of Artificial Sequence: Synthetic oligonucleotide
gcggaagaacuugggggacc

SEQ ID NO: 1556 - RNA, 20 nt, Artificial Sequence
  Description of Artificial Sequence: Synthetic oligonucleotide
uccccgggcccgagagccgg

SEQ ID NO: 1557 - RNA, 20 nt, Artificial Sequence
  Description of Artificial Sequence: Synthetic oligonucleotide
gggacccggccuccggcucu

SEQ ID NO: 1558 - RNA, 20 nt, Artificial Sequence
  Description of Artificial Sequence: Synthetic oligonucleotide
ggacccggccuccggcucuc

SEQ ID NO: 1559 - RNA, 20 nt, Artificial Sequence
  Description of Artificial Sequence: Synthetic oligonucleotide
cggccuccggcucucgggcc

SEQ ID NO: 1560 - RNA, 20 nt, Artificial Sequence
  Description of Artificial Sequence: Synthetic oligonucleotide
agccuagggcguagcucccc

SEQ ID NO: 1561 - RNA, 20 nt, Artificial Sequence
  Description of Artificial Sequence: Synthetic oligonucleotide
cagccuagggcguagcuccc

SEQ ID NO: 1562 - RNA, 20 nt, Artificial Sequence
  Description of Artificial Sequence: Synthetic oligonucleotide
ggcccggggagcuacgcccu

SEQ ID NO: 1563 - RNA, 20 nt, Artificial Sequence
  Description of Artificial Sequence: Synthetic oligonucleotide
gauggcugggacccagccua

SEQ ID NO: 1564 - RNA, 20 nt, Artificial Sequence
  Description of Artificial Sequence: Synthetic oligonucleotide
cgccgccaucuuagccugug

SEQ ID NO: 1565 - RNA, 20 nt, Artificial Sequence
  Description of Artificial Sequence: Synthetic oligonucleotide
acaggcuaagauggcggcgg

SEQ ID NO: 1566 - RNA, 20 nt, Artificial Sequence
  Description of Artificial Sequence: Synthetic oligonucleotide
uuggugcuacacaaggagcc

SEQ ID NO: 1567 - RNA, 20 nt, Artificial Sequence
  Description of Artificial Sequence: Synthetic oligonucleotide
uggugcuacacaaggagccc

SEQ ID NO: 1568 - RNA, 20 nt, Artificial Sequence
  Description of Artificial Sequence: Synthetic oligonucleotide
acacaaggagcccgggcccc

SEQ ID NO: 1569 - RNA, 20 nt, Artificial Sequence
  Description of Artificial Sequence: Synthetic oligonucleotide
ggagcccgggccccggguuc

SEQ ID NO: 1570 - RNA, 20 nt, Artificial Sequence
  Description of Artificial Sequence: Synthetic oligonucleotide
ggccgccgccuccccgaacc

SEQ ID NO: 1571 - RNA, 20 nt, Artificial Sequence
  Description of Artificial Sequence: Synthetic oligonucleotide
cccgggccccggguucgggg

SEQ ID NO: 1572 - RNA, 20 nt, Artificial Sequence
  Description of Artificial Sequence: Synthetic oligonucleotide
guucggggaggcggcggccg

SEQ ID NO: 1573 - RNA, 20 nt, Artificial Sequence
  Description of Artificial Sequence: Synthetic oligonucleotide
cgagucccgccccgcggcgg

SEQ ID NO: 1574 - RNA, 20 nt, Artificial Sequence
  Description of Artificial Sequence: Synthetic oligonucleotide
cgccgagucccgccccgcgg

SEQ ID NO: 1575 - RNA, 20 nt, Artificial Sequence
  Description of Artificial Sequence: Synthetic oligonucleotide
gcgggacucggcggggggau

SEQ ID NO: 1576 - RNA, 20 nt, Artificial Sequence
  Description of Artificial Sequence: Synthetic oligonucleotide
ggggggggggcuuuccgcug

SEQ ID NO: 1577 - RNA, 20 nt, Artificial Sequence
  Description of Artificial Sequence: Synthetic oligonucleotide
cgcugcggcgucggaggauc

SEQ ID NO: 1578 - RNA, 20 nt, Artificial Sequence
  Description of Artificial Sequence: Synthetic oligonucleotide
gagcagccagugagcaguag

SEQ ID NO: 1579 - RNA, 20 nt, Artificial Sequence
  Description of Artificial Sequence: Synthetic oligonucleotide
ccagugagcaguagggggaa

SEQ ID NO: 1580 - RNA, 20 nt, Artificial Sequence
  Description of Artificial Sequence: Synthetic oligonucleotide
aucaggcggcuuggggagcc

SEQ ID NO: 1581 - RNA, 20 nt, Artificial Sequence
  Description of Artificial Sequence: Synthetic oligonucleotide
auugcaaugcacugaguaac

SEQ ID NO: 1582 - RNA, 20 nt, Artificial Sequence
  Description of Artificial Sequence: Synthetic oligonucleotide
aaugccagagccagcguuuc

SEQ ID NO: 1583 - RNA, 20 nt, Artificial Sequence
  Description of Artificial Sequence: Synthetic oligonucleotide
guggccagaaacgcuggcuc

SEQ ID NO: 1584 - RNA, 20 nt, Artificial Sequence
  Description of Artificial Sequence: Synthetic oligonucleotide
gcgguccugucccaaguaag

SEQ ID NO: 1585 - RNA, 20 nt, Artificial Sequence
  Description of Artificial Sequence: Synthetic oligonucleotide
ucuacaccccuccccuuacu

SEQ ID NO: 1586 - RNA, 20 nt, Artificial Sequence
  Description of Artificial Sequence: Synthetic oligonucleotide
agaucuugcaggacgggggg

SEQ ID NO: 1587 - RNA, 20 nt, Artificial Sequence
  Description of Artificial Sequence: Synthetic oligonucleotide
gccugggaaguaacagcaag

SEQ ID NO: 1588 - RNA, 20 nt, Artificial Sequence
  Description of Artificial Sequence: Synthetic oligonucleotide
cuaaagcuuuuugccucucc

SEQ ID NO: 1589 - RNA, 20 nt, Artificial Sequence
  Description of Artificial Sequence: Synthetic oligonucleotide
ccagagaaucagaccuggag

SEQ ID NO: 1590 - RNA, 20 nt, Artificial Sequence
  Description of Artificial Sequence: Synthetic oligonucleotide
cugggaaguuacucugccag

SEQ ID NO: 1591 - RNA, 20 nt, Artificial Sequence
  Description of Artificial Sequence: Synthetic oligonucleotide
uuacucugccagaggaaagc

SEQ ID NO: 1592 - RNA, 20 nt, Artificial Sequence
  Description of Artificial Sequence: Synthetic oligonucleotide
caacucaucuucagguucac

SEQ ID NO: 1593 - RNA, 20 nt, Artificial Sequence
  Description of Artificial Sequence: Synthetic oligonucleotide
uucucagugauuggaaacuu

SEQ ID NO: 1594 - RNA, 20 nt, Artificial Sequence
  Description of Artificial Sequence: Synthetic oligonucleotide
ucagugauuggaaacuuagg

SEQ ID NO: 1595 - RNA, 20 nt, Artificial Sequence
  Description of Artificial Sequence: Synthetic oligonucleotide
gugauuggaaacuuaggugg

SEQ ID NO: 1596 - RNA, 20 nt, Artificial Sequence
  Description of Artificial Sequence: Synthetic oligonucleotide
cuucuacagacaacucuugu

SEQ ID NO: 1597 - RNA, 20 nt, Artificial Sequence
  Description of Artificial Sequence: Synthetic oligonucleotide
uucuacagacaacucuuguu

SEQ ID NO: 1598 - RNA, 20 nt, Artificial Sequence
  Description of Artificial Sequence: Synthetic oligonucleotide
ugaucaucaaacucaacgag

SEQ ID NO: 1599 - RNA, 20 nt, Artificial Sequence
  Description of Artificial Sequence: Synthetic oligonucleotide
uuaggacuggacaggauagu

SEQ ID NO: 1600 - RNA, 20 nt, Artificial Sequence
  Description of Artificial Sequence: Synthetic oligonucleotide
aacuaaagcaaacuacugca

SEQ ID NO: 1601 - RNA, 20 nt, Artificial Sequence
  Description of Artificial Sequence: Synthetic oligonucleotide
aauuauaucauacuuugugu

SEQ ID NO: 1602 - RNA, 20 nt, Artificial Sequence
  Description of Artificial Sequence: Synthetic oligonucleotide
aauuaacagaauuccuuggu

SEQ ID NO: 1603 - RNA, 20 nt, Artificial Sequence
  Description of Artificial Sequence: Synthetic oligonucleotide
uuuaaauaucccuccaacca

SEQ ID NO: 1604 - RNA, 20 nt, Artificial Sequence
  Description of Artificial Sequence: Synthetic oligonucleotide
uaacagaauuccuugguugg

SEQ ID NO: 1605 - RNA, 20 nt, Artificial Sequence
  Description of Artificial Sequence: Synthetic oligonucleotide
aacagaauuccuugguugga

SEQ ID NO: 1606 - RNA, 20 nt, Artificial Sequence
  Description of Artificial Sequence: Synthetic oligonucleotide
uggaucauaaaguuuuacag

SEQ ID NO: 1607 - RNA, 20 nt, Artificial Sequence
  Description of Artificial Sequence: Synthetic oligonucleotide
uccucaauauauuguaaaag

SEQ ID NO: 1608 - RNA, 20 nt, Artificial Sequence
  Description of Artificial Sequence: Synthetic oligonucleotide
gccacuaacuuaaucaucuc

SEQ ID NO: 1609 - RNA, 20 nt, Artificial Sequence
  Description of Artificial Sequence: Synthetic oligonucleotide
augacaaauacaaacagcaa

SEQ ID NO: 1610 - RNA, 20 nt, Artificial Sequence
  Description of Artificial Sequence: Synthetic oligonucleotide
gucauauugcugggaugaga

SEQ ID NO: 1611 - RNA, 20 nt, Artificial Sequence
  Description of Artificial Sequence: Synthetic oligonucleotide
aacuaaugguuaaaaaaaca

SEQ ID NO: 1612 - RNA, 20 nt, Artificial Sequence
  Description of Artificial Sequence: Synthetic oligonucleotide
uucauauucugugguuaacu

SEQ ID NO: 1613 - RNA, 20 nt, Artificial Sequence
  Description of Artificial Sequence: Synthetic oligonucleotide
acuuucagugaaacaaaauc

SEQ ID NO: 1614 - RNA, 20 nt, Artificial Sequence
  Description of Artificial Sequence: Synthetic oligonucleotide
aaagaaauuuaucaaguccc

SEQ ID NO: 1615 - RNA, 20 nt, Artificial Sequence
  Description of Artificial Sequence: Synthetic oligonucleotide
uucuuuuccuacauaauaac

SEQ ID NO: 1616 - RNA, 20 nt, Artificial Sequence
  Description of Artificial Sequence: Synthetic oligonucleotide
aauuuccuaacagaccuuag

SEQ ID NO: 1617 - RNA, 20 nt, Artificial Sequence
  Description of Artificial Sequence: Synthetic oligonucleotide
aauuuucaacauuaugugag

SEQ ID NO: 1618 - RNA, 20 nt, Artificial Sequence
  Description of Artificial Sequence: Synthetic oligonucleotide
gguuauuuguaguuauaaag

SEQ ID NO: 1619 - RNA, 20 nt, Artificial Sequence
  Description of Artificial Sequence: Synthetic oligonucleotide
uucaaguuauaagaguguuu

SEQ ID NO: 1620 - RNA, 20 nt, Artificial Sequence
  Description of Artificial Sequence: Synthetic oligonucleotide
gguugaauugagacuguuaa

SEQ ID NO: 1621 - RNA, 20 nt, Artificial Sequence
  Description of Artificial Sequence: Synthetic oligonucleotide
guugaauugagacuguuaau

SEQ ID NO: 1622 - RNA, 20 nt, Artificial Sequence
  Description of Artificial Sequence: Synthetic oligonucleotide
gacuguuaauggguagcagg

SEQ ID NO: 1623 - RNA, 20 nt, Artificial Sequence
  Description of Artificial Sequence: Synthetic oligonucleotide
ucaaagagaauagaaguggu

SEQ ID NO: 1624 - RNA, 20 nt, Artificial Sequence
  Description of Artificial Sequence: Synthetic oligonucleotide
gauaucugcaaucuagagaa

SEQ ID NO: 1625 - RNA, 20 nt, Artificial Sequence
  Description of Artificial Sequence: Synthetic oligonucleotide
cugcaaucuagagaaagguc

SEQ ID NO: 1626 - RNA, 20 nt, Artificial Sequence
  Description of Artificial Sequence: Synthetic oligonucleotide
agaaucacauccugagaaaa

SEQ ID NO: 1627 - RNA, 20 nt, Artificial Sequence
  Description of Artificial Sequence: Synthetic oligonucleotide
ucucaggaugugauucugga

SEQ ID NO: 1628 - RNA, 20 nt, Artificial Sequence
  Description of Artificial Sequence: Synthetic oligonucleotide
cuugcagcaaauggagaaau

SEQ ID NO: 1629 - RNA, 20 nt, Artificial Sequence
  Description of Artificial Sequence: Synthetic oligonucleotide
uuuacacuuauuaaucuuuc

SEQ ID NO: 1630 - RNA, 20 nt, Artificial Sequence
  Description of Artificial Sequence: Synthetic oligonucleotide
gagaaugucuauuucguaua

SEQ ID NO: 1631 - RNA, 20 nt, Artificial Sequence
  Description of Artificial Sequence: Synthetic oligonucleotide
gacugaagcaguucuagaag

SEQ ID NO: 1632 - RNA, 20 nt, Artificial Sequence
  Description of Artificial Sequence: Synthetic oligonucleotide
ccaaaacucaaugguguaaa

SEQ ID NO: 1633 - RNA, 20 nt, Artificial Sequence
  Description of Artificial Sequence: Synthetic oligonucleotide
aagaucacaggagacccaga

SEQ ID NO: 1634 - RNA, 20 nt, Artificial Sequence
  Description of Artificial Sequence: Synthetic oligonucleotide
caagaaaacaccuuuuucau

SEQ ID NO: 1635 - RNA, 20 nt, Artificial Sequence
  Description of Artificial Sequence: Synthetic oligonucleotide
agaggaaguucccaugaaaa

SEQ ID NO: 1636 - RNA, 20 nt, Artificial Sequence
  Description of Artificial Sequence: Synthetic oligonucleotide
aagguguuuucuugucucua

SEQ ID NO: 1637 - RNA, 20 nt, Artificial Sequence
  Description of Artificial Sequence: Synthetic oligonucleotide
agaucugccaaguugaacca

SEQ ID NO: 1638 - RNA, 20 nt, Artificial Sequence
  Description of Artificial Sequence: Synthetic oligonucleotide
cuauccuuuuugaacuuccu

SEQ ID NO: 1639 - RNA, 20 nt, Artificial Sequence
  Description of Artificial Sequence: Synthetic oligonucleotide
auaaucacauaagaguuccc

SEQ ID NO: 1640 - RNA, 20 nt, Artificial Sequence
  Description of Artificial Sequence: Synthetic oligonucleotide
uaacaucucucaauugucaa

SEQ ID NO: 1641 - RNA, 20 nt, Artificial Sequence
  Description of Artificial Sequence: Synthetic oligonucleotide
ugguugggagaaagugagac

SEQ ID NO: 1642 - RNA, 20 nt, Artificial Sequence
  Description of Artificial Sequence: Synthetic oligonucleotide
ggccaagauuaguaggagag

SEQ ID NO: 1643 - RNA, 20 nt, Artificial Sequence
  Description of Artificial Sequence: Synthetic oligonucleotide
gggccaagauuaguaggaga

SEQ ID NO: 1644 - RNA, 20 nt, Artificial Sequence
  Description of Artificial Sequence: Synthetic oligonucleotide
uuccccucuccuacuaaucu

SEQ ID NO: 1645 - RNA, 20 nt, Artificial Sequence
  Description of Artificial Sequence: Synthetic oligonucleotide
gcuagcagacagaagaggua

SEQ ID NO: 1646 - RNA, 20 nt, Artificial Sequence
  Description of Artificial Sequence: Synthetic oligonucleotide
caaaggauuccaaaugaaau

SEQ ID NO: 1647 - RNA, 20 nt, Artificial Sequence
  Description of Artificial Sequence: Synthetic oligonucleotide
ucaaaggauuccaaaugaaa

SEQ ID NO: 1648 - RNA, 20 nt, Artificial Sequence
  Description of Artificial Sequence: Synthetic oligonucleotide
aauucuguuagccuagauuu

SEQ ID NO: 1649 - RNA, 20 nt, Artificial Sequence
  Description of Artificial Sequence: Synthetic oligonucleotide
gauuuugguagaauugaagc

SEQ ID NO: 1650 - RNA, 20 nt, Artificial Sequence
  Description of Artificial Sequence: Synthetic oligonucleotide
uaaaauaauugauagacuac

SEQ ID NO: 1651 - RNA, 20 nt, Artificial Sequence
  Description of Artificial Sequence: Synthetic oligonucleotide
cuuucagagcaccauuuauu

SEQ ID NO: 1652 - RNA, 20 nt, Artificial Sequence
  Description of Artificial Sequence: Synthetic oligonucleotide
cagagcaccauuuauugggg

SEQ ID NO: 1653 - RNA, 20 nt, Artificial Sequence
  Description of Artificial Sequence: Synthetic oligonucleotide
ccauuuauuggggaggagag

SEQ ID NO: 1654 - RNA, 20 nt, Artificial Sequence
  Description of Artificial Sequence: Synthetic oligonucleotide
uucacaaaccaacaauaaau

SEQ ID NO: 1655 - RNA, 20 nt, Artificial Sequence
  Description of Artificial Sequence: Synthetic oligonucleotide
aauuuauuguugguuuguga

SEQ ID NO: 1656 - RNA, 20 nt, Artificial Sequence
  Description of Artificial Sequence: Synthetic oligonucleotide
gguuugugaagguggguaaa

SEQ ID NO: 1657 - RNA, 20 nt, Artificial Sequence
  Description of Artificial Sequence: Synthetic oligonucleotide
gugagucaguagcaaacaaa

SEQ ID NO: 1658 - RNA, 20 nt, Artificial Sequence
  Description of Artificial Sequence: Synthetic oligonucleotide
acccugucaauuuuacuuca

SEQ ID NO: 1659 - RNA, 20 nt, Artificial Sequence
  Description of Artificial Sequence: Synthetic oligonucleotide
gccuugaaguaaaauugaca

SEQ ID NO: 1660 - RNA, 20 nt, Artificial Sequence
  Description of Artificial Sequence: Synthetic oligonucleotide
acccuaaaccucuuugaaga

SEQ ID NO: 1661 - RNA, 20 nt, Artificial Sequence
  Description of Artificial Sequence: Synthetic oligonucleotide
cauuguaugccagaaagcua

SEQ ID NO: 1662 - RNA, 20 nt, Artificial Sequence
  Description of Artificial Sequence: Synthetic oligonucleotide
uacaacugcaaaucacucac

SEQ ID NO: 1663 - RNA, 20 nt, Artificial Sequence
  Description of Artificial Sequence: Synthetic oligonucleotide
uuaucggcauggcuuaaaau

SEQ ID NO: 1664 - RNA, 20 nt, Artificial Sequence
  Description of Artificial Sequence: Synthetic oligonucleotide
uuuaucggcauggcuuaaaa

SEQ ID NO: 1665 - RNA, 20 nt, Artificial Sequence
  Description of Artificial Sequence: Synthetic oligonucleotide
uaaagacaagguuguuauag

SEQ ID NO: 1666 - RNA, 20 nt, Artificial Sequence
  Description of Artificial Sequence: Synthetic oligonucleotide
cauuccugaaauauuuaacc

SEQ ID NO: 1667 - RNA, 20 nt, Artificial Sequence
  Description of Artificial Sequence: Synthetic oligonucleotide
auaaccagguuaaauauuuc

SEQ ID NO: 1668 - RNA, 20 nt, Artificial Sequence
  Description of Artificial Sequence: Synthetic oligonucleotide
uacucaucugcugacagugc

SEQ ID NO: 1669 - RNA, 20 nt, Artificial Sequence
  Description of Artificial Sequence: Synthetic oligonucleotide
gcagaugaguagauacacuu

SEQ ID NO: 1670 - RNA, 20 nt, Artificial Sequence
  Description of Artificial Sequence: Synthetic oligonucleotide
agacaaaccaaugcacuggc

SEQ ID NO: 1671 - RNA, 20 nt, Artificial Sequence
  Description of Artificial Sequence: Synthetic oligonucleotide
acaaagacaaaccaaugcac

SEQ ID NO: 1672 - RNA, 20 nt, Artificial Sequence
  Description of Artificial Sequence: Synthetic oligonucleotide
uuauuucccagccagugcau

SEQ ID NO: 1673 - RNA, 20 nt, Artificial Sequence
  Description of Artificial Sequence: Synthetic oligonucleotide
ccucacagucaaaaauugaa

SEQ ID NO: 1674 - RNA, 20 nt, Artificial Sequence
  Description of Artificial Sequence: Synthetic oligonucleotide
ccuuucaauuuuugacugug

SEQ ID NO: 1675 - RNA, 20 nt, Artificial Sequence
  Description of Artificial Sequence: Synthetic oligonucleotide
uuuuugacugugaggccaug

SEQ ID NO: 1676 - RNA, 20 nt, Artificial Sequence
  Description of Artificial Sequence: Synthetic oligonucleotide
uuucauuggauagucugagu

SEQ ID NO: 1677 - RNA, 20 nt, Artificial Sequence
  Description of Artificial Sequence: Synthetic oligonucleotide
uucauuggauagucugaguu

SEQ ID NO: 1678 - RNA, 20 nt, Artificial Sequence
  Description of Artificial Sequence: Synthetic oligonucleotide
uguuuuguauaugucugugc

SEQ ID NO: 1679 - RNA, 20 nt, Artificial Sequence
  Description of Artificial Sequence: Synthetic oligonucleotide
uugugcuaggaggagguugg

SEQ ID NO: 1680 - RNA, 20 nt, Artificial Sequence
  Description of Artificial Sequence: Synthetic oligonucleotide
uuaaaauccguguuugugcu

SEQ ID NO: 1681 - RNA, 20 nt, Artificial Sequence
  Description of Artificial Sequence: Synthetic oligonucleotide
aauuuuagguucauuugagg

SEQ ID NO: 1682 - RNA, 20 nt, Artificial Sequence
  Description of Artificial Sequence: Synthetic oligonucleotide
uuuuagguucauuugaggag

SEQ ID NO: 1683 - RNA, 20 nt, Artificial Sequence
  Description of Artificial Sequence: Synthetic oligonucleotide
gcuugaaaaauacagcaauu

SEQ ID NO: 1684 - RNA, 20 nt, Artificial Sequence
  Description of Artificial Sequence: Synthetic oligonucleotide
gcaauuuggaaagugaggga

SEQ ID NO: 1685 - RNA, 20 nt, Artificial Sequence
  Description of Artificial Sequence: Synthetic oligonucleotide
gaguagccaaguuugaaccu

SEQ ID NO: 1686 - RNA, 20 nt, Artificial Sequence
  Description of Artificial Sequence: Synthetic oligonucleotide
uuacaaauuguguaacaacu

SEQ ID NO: 1687 - RNA, 20 nt, Artificial Sequence
  Description of Artificial Sequence: Synthetic oligonucleotide
gacaaagagccuuuauaugg

SEQ ID NO: 1688 - RNA, 20 nt, Artificial Sequence
  Description of Artificial Sequence: Synthetic oligonucleotide
caagacaaagagccuuuaua

SEQ ID NO: 1689 - RNA, 20 nt, Artificial Sequence
  Description of Artificial Sequence: Synthetic oligonucleotide
uugucuuggcugcuggacau

SEQ ID NO: 1690 - RNA, 20 nt, Artificial Sequence
  Description of Artificial Sequence: Synthetic oligonucleotide
uaugggauuuggauugcuac

SEQ ID NO: 1691 - RNA, 20 nt, Artificial Sequence
  Description of Artificial Sequence: Synthetic oligonucleotide
agucaaaugucccaccagca

SEQ ID NO: 1692 - RNA, 20 nt, Artificial Sequence
  Description of Artificial Sequence: Synthetic oligonucleotide
ucccuuuaagauuuuuaaca

SEQ ID NO: 1693 - RNA, 20 nt, Artificial Sequence
  Description of Artificial Sequence: Synthetic oligonucleotide
gcuacugaauaccugaacuc

SEQ ID NO: 1694 - RNA, 20 nt, Artificial Sequence
  Description of Artificial Sequence: Synthetic oligonucleotide
cuguucucagcuauccuuua

SEQ ID NO: 1695 - RNA, 20 nt, Artificial Sequence
  Description of Artificial Sequence: Synthetic oligonucleotide
aguggcuugaauccaguuua

SEQ ID NO: 1696 - RNA, 20 nt, Artificial Sequence
  Description of Artificial Sequence: Synthetic oligonucleotide
ccaaaccaaauucccuaaac

SEQ ID NO: 1697 - RNA, 20 nt, Artificial Sequence
  Description of Artificial Sequence: Synthetic oligonucleotide
ugaauccaguuuagggaauu

SEQ ID NO: 1698 - RNA, 20 nt, Artificial Sequence
  Description of Artificial Sequence: Synthetic oligonucleotide
ccaguuuagggaauuugguu

SEQ ID NO: 1699 - RNA, 20 nt, Artificial Sequence
  Description of Artificial Sequence: Synthetic oligonucleotide
caguuuagggaauuugguuu

SEQ ID NO: 1700 - RNA, 20 nt, Artificial Sequence
  Description of Artificial Sequence: Synthetic oligonucleotide
aagaucgacuaggcuuuguu

SEQ ID NO: 1701 - RNA, 20 nt, Artificial Sequence
  Description of Artificial Sequence: Synthetic oligonucleotide
aagggaaaguguuucauuua

SEQ ID NO: 1702 - RNA, 20 nt, Artificial Sequence
  Description of Artificial Sequence: Synthetic oligonucleotide
augauggagauugauaaaga

SEQ ID NO: 1703 - RNA, 20 nt, Artificial Sequence
  Description of Artificial Sequence: Synthetic oligonucleotide
gggagguacuggguuacacc

SEQ ID NO: 1704 - RNA, 20 nt, Artificial Sequence
  Description of Artificial Sequence: Synthetic oligonucleotide
uuuauggugauagagguuag

SEQ ID NO: 1705 - RNA, 20 nt, Artificial Sequence
  Description of Artificial Sequence: Synthetic oligonucleotide
cauauuuguccucccuccca

SEQ ID NO: 1706 - RNA, 20 nt, Artificial Sequence
  Description of Artificial Sequence: Synthetic oligonucleotide
aauucucacuacccuuggga

SEQ ID NO: 1707 - RNA, 20 nt, Artificial Sequence
  Description of Artificial Sequence: Synthetic oligonucleotide
auauuuguccucccucccaa

SEQ ID NO: 1708 - RNA, 20 nt, Artificial Sequence
  Description of Artificial Sequence: Synthetic oligonucleotide
caucaauucucacuacccuu

SEQ ID NO: 1709 - RNA, 20 nt, Artificial Sequence
  Description of Artificial Sequence: Synthetic oligonucleotide
gcaucaauucucacuacccu

SEQ ID NO: 1710 - RNA, 20 nt, Artificial Sequence
  Description of Artificial Sequence: Synthetic oligonucleotide
uggcauuguuaugaauuggg

SEQ ID NO: 1711 - RNA, 20 nt, Artificial Sequence
  Description of Artificial Sequence: Synthetic oligonucleotide
uaugaauugggagguaaauc

SEQ ID NO: 1712 - RNA, 20 nt, Artificial Sequence
  Description of Artificial Sequence: Synthetic oligonucleotide
ucucugauuuugucacuggg

SEQ ID NO: 1713 - RNA, 20 nt, Artificial Sequence
  Description of Artificial Sequence: Synthetic oligonucleotide
ccucucugauuuugucacug

SEQ ID NO: 1714 - RNA, 20 nt, Artificial Sequence
  Description of Artificial Sequence: Synthetic oligonucleotide
caccucucugauuuugucac

SEQ ID NO: 1715 - RNA, 20 nt, Artificial Sequence
  Description of Artificial Sequence: Synthetic oligonucleotide
ccccagugacaaaaucagag

SEQ ID NO: 1716 - RNA, 20 nt, Artificial Sequence
  Description of Artificial Sequence: Synthetic oligonucleotide
caaaaaccaucuauauaagg

SEQ ID NO: 1717 - RNA, 20 nt, Artificial Sequence
  Description of Artificial Sequence: Synthetic oligonucleotide
cuccuuauauagaugguuuu

SEQ ID NO: 1718 - RNA, 20 nt, Artificial Sequence
  Description of Artificial Sequence: Synthetic oligonucleotide
ccuggaagcuaccaucaaag

SEQ ID NO: 1719 - RNA, 20 nt, Artificial Sequence
  Description of Artificial Sequence: Synthetic oligonucleotide
auucuacuuuucuguugaac

SEQ ID NO: 1720 - RNA, 20 nt, Artificial Sequence
  Description of Artificial Sequence: Synthetic oligonucleotide
auuuauaaagucuccuacau

SEQ ID NO: 1721 - RNA, 20 nt, Artificial Sequence
  Description of Artificial Sequence: Synthetic oligonucleotide
cauuuauaaagucuccuaca

SEQ ID NO: 1722 - RNA, 20 nt, Artificial Sequence
  Description of Artificial Sequence: Synthetic oligonucleotide
uacaacuauuaauuccauuu

SEQ ID NO: 1723 - RNA, 20 nt, Artificial Sequence
  Description of Artificial Sequence: Synthetic oligonucleotide
cuacaacuauuaauuccauu

SEQ ID NO: 1724 - RNA, 20 nt, Artificial Sequence
  Description of Artificial Sequence: Synthetic oligonucleotide
aauacugcuauacuacaaua

SEQ ID NO: 1725 - RNA, 20 nt, Artificial Sequence
  Description of Artificial Sequence: Synthetic oligonucleotide
ucuucacauucuaguauauc

SEQ ID NO: 1726 - RNA, 20 nt, Artificial Sequence
  Description of Artificial Sequence: Synthetic oligonucleotide
uagcuuuugugaaguauaga

SEQ ID NO: 1727 - RNA, 20 nt, Artificial Sequence
  Description of Artificial Sequence: Synthetic oligonucleotide
uauagaaggcuaaagcaaau

SEQ ID NO: 1728 - RNA, 20 nt, Artificial Sequence
  Description of Artificial Sequence: Synthetic oligonucleotide
acuuuacacauaacagcuuu

SEQ ID NO: 1729 - RNA, 20 nt, Artificial Sequence
  Description of Artificial Sequence: Synthetic oligonucleotide
uuuacacauaacagcuuuug

SEQ ID NO: 1730 - RNA, 20 nt, Artificial Sequence
  Description of Artificial Sequence: Synthetic oligonucleotide
auaugcaacccuaccccuag

SEQ ID NO: 1731 - RNA, 20 nt, Artificial Sequence
  Description of Artificial Sequence: Synthetic oligonucleotide
acaccacuucuucaaaaucu

SEQ ID NO: 1732 - RNA, 20 nt, Artificial Sequence
  Description of Artificial Sequence: Synthetic oligonucleotide
uggagggaucuaaagaaguu

SEQ ID NO: 1733 - RNA, 20 nt, Artificial Sequence
  Description of Artificial Sequence: Synthetic oligonucleotide
gugauuauuaucuuugugag

SEQ ID NO: 1734 - RNA, 20 nt, Artificial Sequence
  Description of Artificial Sequence: Synthetic oligonucleotide
auuaucuuugugagugggaa

SEQ ID NO: 1735 - RNA, 20 nt, Artificial Sequence
  Description of Artificial Sequence: Synthetic oligonucleotide
ccaauaaaguuaugcuauaa

SEQ ID NO: 1736 - RNA, 20 nt, Artificial Sequence
  Description of Artificial Sequence: Synthetic oligonucleotide
uaaaaaauauuuaagguaac

SEQ ID NO: 1737 - RNA, 20 nt, Artificial Sequence
  Description of Artificial Sequence: Synthetic oligonucleotide
uaauuuguauuggagcuggc

SEQ ID NO: 1738 - RNA, 20 nt, Artificial Sequence
  Description of Artificial Sequence: Synthetic oligonucleotide
uaccuguuggaaaggagcga

SEQ ID NO: 1739 - RNA, 20 nt, Artificial Sequence
  Description of Artificial Sequence: Synthetic oligonucleotide
augaaguccuuuccagcuuu

SEQ ID NO: 1740 - RNA, 20 nt, Artificial Sequence
  Description of Artificial Sequence: Synthetic oligonucleotide
aggugauacaugaauaacca

SEQ ID NO: 1741 - RNA, 20 nt, Artificial Sequence
  Description of Artificial Sequence: Synthetic oligonucleotide
gacguuaauagugagguuuu

SEQ ID NO: 1742 - RNA, 20 nt, Artificial Sequence
  Description of Artificial Sequence: Synthetic oligonucleotide
uuugggaaugugguaaaacc

SEQ ID NO: 1743 - RNA, 20 nt, Artificial Sequence
  Description of Artificial Sequence: Synthetic oligonucleotide
acaaagucaaauauaccucc

SEQ ID NO: 1744 - RNA, 20 nt, Artificial Sequence
  Description of Artificial Sequence: Synthetic oligonucleotide
cagcuaaagcaaaauacagu

SEQ ID NO: 1745 - RNA, 20 nt, Artificial Sequence
  Description of Artificial Sequence: Synthetic oligonucleotide
cucuaggucccagugauagu

SEQ ID NO: 1746 - RNA, 20 nt, Artificial Sequence
  Description of Artificial Sequence: Synthetic oligonucleotide
gagauguagaugaaaucucu

SEQ ID NO: 1747 - RNA, 20 nt, Artificial Sequence
  Description of Artificial Sequence: Synthetic oligonucleotide
gggguuucuguaugauagua

SEQ ID NO: 1748 - RNA, 20 nt, Artificial Sequence
  Description of Artificial Sequence: Synthetic oligonucleotide
guaugauaguaugggugaga

SEQ ID NO: 1749 - RNA, 20 nt, Artificial Sequence
  Description of Artificial Sequence: Synthetic oligonucleotide
agggcuauucccaagaacuc

SEQ ID NO: 1750 - RNA, 20 nt, Artificial Sequence
  Description of Artificial Sequence: Synthetic oligonucleotide
ucuacaaacaaauggaggua

SEQ ID NO: 1751 - RNA, 20 nt, Artificial Sequence
  Description of Artificial Sequence: Synthetic oligonucleotide
aucuacaaacaaauggaggu

SEQ ID NO: 1752 - RNA, 20 nt, Artificial Sequence
  Description of Artificial Sequence: Synthetic oligonucleotide
ucucaucuacaaacaaaugg

SEQ ID NO: 1753 - RNA, 20 nt, Artificial Sequence
  Description of Artificial Sequence: Synthetic oligonucleotide
ccuucuccacugacagcaga

SEQ ID NO: 1754 - RNA, 20 nt, Artificial Sequence
  Description of Artificial Sequence: Synthetic oligonucleotide
accaauuccugaagcauucc

SEQ ID NO: 1755 - RNA, 20 nt, Artificial Sequence
  Description of Artificial Sequence: Synthetic oligonucleotide
cuuuuagacaauuccuucag

SEQ ID NO: 1756 - RNA, 20 nt, Artificial Sequence
  Description of Artificial Sequence: Synthetic oligonucleotide
ccaguauucucagaacuggg

SEQ ID NO: 1757 - RNA, 20 nt, Artificial Sequence
  Description of Artificial Sequence: Synthetic oligonucleotide
uuuuaaucucacagcuagau

SEQ ID NO: 1758 - RNA, 20 nt, Artificial Sequence
  Description of Artificial Sequence: Synthetic oligonucleotide
cuuuuaaucucacagcuaga

SEQ ID NO: 1759 - RNA, 20 nt, Artificial Sequence
  Description of Artificial Sequence: Synthetic oligonucleotide
ucucagcaguuugcugucac

SEQ ID NO: 1760 - RNA, 20 nt, Artificial Sequence
  Description of Artificial Sequence: Synthetic oligonucleotide
uuaaugaguagacauacugu

SEQ ID NO: 1761 - RNA, 20 nt, Artificial Sequence
  Description of Artificial Sequence: Synthetic oligonucleotide
aggcacuuaaaaguugccua

SEQ ID NO: 1762 - RNA, 20 nt, Artificial Sequence
  Description of Artificial Sequence: Synthetic oligonucleotide
gaggcacuuaaaaguugccu

SEQ ID NO: 1763 - RNA, 20 nt, Artificial Sequence
  Description of Artificial Sequence: Synthetic oligonucleotide
uaagguuauccucaaauguu

SEQ ID NO: 1764 - RNA, 20 nt, Artificial Sequence
  Description of Artificial Sequence: Synthetic oligonucleotide
caagcgauuugcugggauua

SEQ ID NO: 1765 - RNA, 20 nt, Artificial Sequence
  Description of Artificial Sequence: Synthetic oligonucleotide
caggaccuagccaaccacgg

SEQ ID NO: 1766 - RNA, 20 nt, Artificial Sequence
  Description of Artificial Sequence: Synthetic oligonucleotide
gaaauugguaaguuaauaug

SEQ ID NO: 1767 - RNA, 20 nt, Artificial Sequence
  Description of Artificial Sequence: Synthetic oligonucleotide
aauguucuuuaguauguacu

SEQ ID NO: 1768 - RNA, 20 nt, Artificial Sequence
  Description of Artificial Sequence: Synthetic oligonucleotide
auaguauagauagaagauca

SEQ ID NO: 1769 - RNA, 20 nt, Artificial Sequence
  Description of Artificial Sequence: Synthetic oligonucleotide
acaaaaagcacauaggcaga

SEQ ID NO: 1770 - RNA, 20 nt, Artificial Sequence
  Description of Artificial Sequence: Synthetic oligonucleotide
agauguaaauuccacuuuau

SEQ ID NO: 1771 - RNA, 20 nt, Artificial Sequence
  Description of Artificial Sequence: Synthetic oligonucleotide
cauggugaagguaaccacau

SEQ ID NO: 1772 - RNA, 20 nt, Artificial Sequence
  Description of Artificial Sequence: Synthetic oligonucleotide
caacuauuuuucauaacaga

SEQ ID NO: 1773 - RNA, 20 nt, Artificial Sequence
  Description of Artificial Sequence: Synthetic oligonucleotide
uaaacauccaaaaaagcuca

SEQ ID NO: 1774 - RNA, 20 nt, Artificial Sequence
  Description of Artificial Sequence: Synthetic oligonucleotide
auaggaguucuacaaaagag

SEQ ID NO: 1775 - RNA, 20 nt, Artificial Sequence
  Description of Artificial Sequence: Synthetic oligonucleotide
aguucacaaaacugucccug

SEQ ID NO: 1776 - RNA, 20 nt, Artificial Sequence
  Description of Artificial Sequence: Synthetic oligonucleotide
uuaauucccuuuccaagcaa

SEQ ID NO: 1777 - RNA, 20 nt, Artificial Sequence
  Description of Artificial Sequence: Synthetic oligonucleotide
uaaaauaacaaacaacgcug

SEQ ID NO: 1778 - RNA, 20 nt, Artificial Sequence
  Description of Artificial Sequence: Synthetic oligonucleotide
gagagccacauguacagaaa

SEQ ID NO: 1779 - RNA, 20 nt, Artificial Sequence
  Description of Artificial Sequence: Synthetic oligonucleotide
gcuuuaaaaagaaaagcugg

SEQ ID NO: 1780 - RNA, 20 nt, Artificial Sequence
  Description of Artificial Sequence: Synthetic oligonucleotide
uaacacaucugguggucucc

SEQ ID NO: 1781 - RNA, 20 nt, Artificial Sequence
  Description of Artificial Sequence: Synthetic oligonucleotide
cugucauuauuuaacacauc

SEQ ID NO: 1782 - RNA, 20 nt, Artificial Sequence
  Description of Artificial Sequence: Synthetic oligonucleotide
ccaagugcuuggaaccaguc

SEQ ID NO: 1783 - RNA, 20 nt, Artificial Sequence
  Description of Artificial Sequence: Synthetic oligonucleotide
aaugcuugaguccaagugcu

SEQ ID NO: 1784 - RNA, 20 nt, Artificial Sequence
  Description of Artificial Sequence: Synthetic oligonucleotide
gggaagaccagcacacuuua

SEQ ID NO: 1785 - RNA, 20 nt, Artificial Sequence
  Description of Artificial Sequence: Synthetic oligonucleotide
uagauggcugaaucuuauuu

SEQ ID NO: 1786 - RNA, 20 nt, Artificial Sequence
  Description of Artificial Sequence: Synthetic oligonucleotide
auagauggcugaaucuuauu

SEQ ID NO: 1787 - RNA, 20 nt, Artificial Sequence
  Description of Artificial Sequence: Synthetic oligonucleotide
cauaaacccagcaagaucac

SEQ ID NO: 1788 - RNA, 20 nt, Artificial Sequence
  Description of Artificial Sequence: Synthetic oligonucleotide
aaaagguacucagucacauu

SEQ ID NO: 1789 - RNA, 20 nt, Artificial Sequence
  Description of Artificial Sequence: Synthetic oligonucleotide
cuggcaauacauauauuaaa

SEQ ID NO: 1790 - RNA, 20 nt, Artificial Sequence
  Description of Artificial Sequence: Synthetic oligonucleotide
aaucaaaaacaugacaucag

SEQ ID NO: 1791 - RNA, 20 nt, Artificial Sequence
  Description of Artificial Sequence: Synthetic oligonucleotide
acauauccuaagagaccagu

SEQ ID NO: 1792 - RNA, 20 nt, Artificial Sequence
  Description of Artificial Sequence: Synthetic oligonucleotide
caaguuugcagucugggccc

SEQ ID NO: 1793 - RNA, 20 nt, Artificial Sequence
  Description of Artificial Sequence: Synthetic oligonucleotide
ggagaccaaguuugcagucu

SEQ ID NO: 1794 - RNA, 20 nt, Artificial Sequence
  Description of Artificial Sequence: Synthetic oligonucleotide
aaccaacuuacucagacacu

SEQ ID NO: 1795 - RNA, 20 nt, Artificial Sequence
  Description of Artificial Sequence: Synthetic oligonucleotide
uagaagcucuguagaacagc

SEQ ID NO: 1796 - RNA, 20 nt, Artificial Sequence
  Description of Artificial Sequence: Synthetic oligonucleotide
auuccccaacuaugcagugu

SEQ ID NO: 1797 - RNA, 20 nt, Artificial Sequence
  Description of Artificial Sequence: Synthetic oligonucleotide
gagaagaccugaagggauug

SEQ ID NO: 1798 - RNA, 20 nt, Artificial Sequence
  Description of Artificial Sequence: Synthetic oligonucleotide
uaggcacagagaagaccuga

SEQ ID NO: 1799 - RNA, 20 nt, Artificial Sequence
  Description of Artificial Sequence: Synthetic oligonucleotide
uggaugacugauaaaccagu

SEQ ID NO: 1800 - RNA, 20 nt, Artificial Sequence
  Description of Artificial Sequence: Synthetic oligonucleotide
auggcagucagagaaccaga

SEQ ID NO: 1801 - RNA, 20 nt, Artificial Sequence
  Description of Artificial Sequence: Synthetic oligonucleotide
cauggcagucagagaaccag

SEQ ID NO: 1802 - RNA, 20 nt, Artificial Sequence
  Description of Artificial Sequence: Synthetic oligonucleotide
aaacagcuagaaauuuaaau

SEQ ID NO: 1803 - RNA, 20 nt, Artificial Sequence
  Description of Artificial Sequence: Synthetic oligonucleotide
auaaagacaguaucacugua

SEQ ID NO: 1804 - RNA, 20 nt, Artificial Sequence
  Description of Artificial Sequence: Synthetic oligonucleotide
gauaaagacaguaucacugu

SEQ ID NO: 1805 - RNA, 20 nt, Artificial Sequence
  Description of Artificial Sequence: Synthetic oligonucleotide
aagcacacaaaaauuaucuc

SEQ ID NO: 1806 - RNA, 20 nt, Artificial Sequence
  Description of Artificial Sequence: Synthetic oligonucleotide
agauaauuuuugugugcuug

SEQ ID NO: 1807 - RNA, 20 nt, Artificial Sequence
  Description of Artificial Sequence: Synthetic oligonucleotide
uucauggagagaacauguuc

SEQ ID NO: 1808 - RNA, 20 nt, Artificial Sequence
  Description of Artificial Sequence: Synthetic oligonucleotide
guacauuugcaaaaacuauu

SEQ ID NO: 1809 - RNA, 20 nt, Artificial Sequence
  Description of Artificial Sequence: Synthetic oligonucleotide
aguacauuugcaaaaacuau

SEQ ID NO: 1810 - RNA, 20 nt, Artificial Sequence
  Description of Artificial Sequence: Synthetic oligonucleotide
aggauaaacaagugacucuc

SEQ ID NO: 1811 - RNA, 20 nt, Artificial Sequence
  Description of Artificial Sequence: Synthetic oligonucleotide
auuacaguggccccaauccu

SEQ ID NO: 1812 - RNA, 20 nt, Artificial Sequence
  Description of Artificial Sequence: Synthetic oligonucleotide
uucuuacucaacuauuacag

SEQ ID NO: 1813 - RNA, 20 nt, Artificial Sequence
  Description of Artificial Sequence: Synthetic oligonucleotide
aguaagaaugugucccuauc

SEQ ID NO: 1814 - RNA, 20 nt, Artificial Sequence
  Description of Artificial Sequence: Synthetic oligonucleotide
guaaccuuaauuuccagaua

SEQ ID NO: 1815 - RNA, 20 nt, Artificial Sequence
  Description of Artificial Sequence: Synthetic oligonucleotide
cauuacuuacaaaaugauuu

SEQ ID NO: 1816 - RNA, 20 nt, Artificial Sequence
  Description of Artificial Sequence: Synthetic oligonucleotide
uuaacuuuugaagacaaggg

SEQ ID NO: 1817 - RNA, 20 nt, Artificial Sequence
  Description of Artificial Sequence: Synthetic oligonucleotide
ucuuaacuuuugaagacaag

SEQ ID NO: 1818 - RNA, 20 nt, Artificial Sequence
  Description of Artificial Sequence: Synthetic oligonucleotide
ucucuuaacuuuugaagaca

SEQ ID NO: 1819 - RNA, 20 nt, Artificial Sequence
  Description of Artificial Sequence: Synthetic oligonucleotide
aauaaguuuuucuuagcccu

SEQ ID NO: 1820 - RNA, 20 nt, Artificial Sequence
  Description of Artificial Sequence: Synthetic oligonucleotide
gccauccuagaucaaccuua

SEQ ID NO: 1821 - RNA, 20 nt, Artificial Sequence
  Description of Artificial Sequence: Synthetic oligonucleotide
cucaucugcuucagaauggg

SEQ ID NO: 1822 - RNA, 20 nt, Artificial Sequence
  Description of Artificial Sequence: Synthetic oligonucleotide
cucccugaucucuuaaaucu

SEQ ID NO: 1823 - RNA, 20 nt, Artificial Sequence
  Description of Artificial Sequence: Synthetic oligonucleotide
uugcauauagaaauuggggc

SEQ ID NO: 1824 - RNA, 20 nt, Artificial Sequence
  Description of Artificial Sequence: Synthetic oligonucleotide
caucaggucugaugagauuu

SEQ ID NO: 1825 - RNA, 20 nt, Artificial Sequence
  Description of Artificial Sequence: Synthetic oligonucleotide
uagacugaauuaccaguugu

SEQ ID NO: 1826 - RNA, 20 nt, Artificial Sequence
  Description of Artificial Sequence: Synthetic oligonucleotide
ugguuauaaaugauuuuuuu

SEQ ID NO: 1827 - RNA, 20 nt, Artificial Sequence
  Description of Artificial Sequence: Synthetic oligonucleotide
cuuaucuugaaugauuucau

SEQ ID NO: 1828 - RNA, 20 nt, Artificial Sequence
  Description of Artificial Sequence: Synthetic oligonucleotide
gaagaauaccaacaggcaua

SEQ ID NO: 1829 - RNA, 20 nt, Artificial Sequence
  Description of Artificial Sequence: Synthetic oligonucleotide
caaacaggaagaauaccaac

SEQ ID NO: 1830 - RNA, 20 nt, Artificial Sequence
  Description of Artificial Sequence: Synthetic oligonucleotide
cauucacugucugggcaaac

SEQ ID NO: 1831 - RNA, 20 nt, Artificial Sequence
  Description of Artificial Sequence: Synthetic oligonucleotide
aagcagaucauucacugucu

SEQ ID NO: 1832 - RNA, 20 nt, Artificial Sequence
  Description of Artificial Sequence: Synthetic oligonucleotide
ccuacuacaggauccaguca

SEQ ID NO: 1833 - RNA, 20 nt, Artificial Sequence
  Description of Artificial Sequence: Synthetic oligonucleotide
gaaaauuugaagcagcacuu

SEQ ID NO: 1834 - RNA, 20 nt, Artificial Sequence
  Description of Artificial Sequence: Synthetic oligonucleotide
aagaacuacaaaguggcacc

SEQ ID NO: 1835 - RNA, 20 nt, Artificial Sequence
  Description of Artificial Sequence: Synthetic oligonucleotide
acccccaaaaaggaacgugg

SEQ ID NO: 1836 - RNA, 20 nt, Artificial Sequence
  Description of Artificial Sequence: Synthetic oligonucleotide
agucacccaaaaggaugaaa

SEQ ID NO: 1837 - RNA, 20 nt, Artificial Sequence
  Description of Artificial Sequence: Synthetic oligonucleotide
guguggaaacuauccaagca

SEQ ID NO: 1838 - RNA, 20 nt, Artificial Sequence
  Description of Artificial Sequence: Synthetic oligonucleotide
uggugguaauccuugaguug

SEQ ID NO: 1839 - RNA, 20 nt, Artificial Sequence
  Description of Artificial Sequence: Synthetic oligonucleotide
aguaucuaugcagaaucugg

SEQ ID NO: 1840 - RNA, 20 nt, Artificial Sequence
  Description of Artificial Sequence: Synthetic oligonucleotide
aagaguaucuaugcagaauc

SEQ ID NO: 1841 - RNA, 20 nt, Artificial Sequence
  Description of Artificial Sequence: Synthetic oligonucleotide
agacauuaggcaaccccuga

SEQ ID NO: 1842 - RNA, 20 nt, Artificial Sequence
  Description of Artificial Sequence: Synthetic oligonucleotide
aagagccaagguggaguaac

SEQ ID NO: 1843 - RNA, 20 nt, Artificial Sequence
  Description of Artificial Sequence: Synthetic oligonucleotide
uggagugguugucaaaaucu

SEQ ID NO: 1844 - RNA, 20 nt, Artificial Sequence
  Description of Artificial Sequence: Synthetic oligonucleotide
guggagugguugucaaaauc

SEQ ID NO: 1845 - RNA, 20 nt, Artificial Sequence
  Description of Artificial Sequence: Synthetic oligonucleotide
augaaccucaaucaccucaa

SEQ ID NO: 1846 - RNA, 20 nt, Artificial Sequence
  Description of Artificial Sequence: Synthetic oligonucleotide
gaugaaccucaaucaccuca

SEQ ID NO: 1847 - RNA, 20 nt, Artificial Sequence
  Description of Artificial Sequence: Synthetic oligonucleotide
ggaacccuuggugcacuguu

SEQ ID NO: 1848 - RNA, 20 nt, Artificial Sequence
  Description of Artificial Sequence: Synthetic oligonucleotide
aaaugggccaaguacuucaa

SEQ ID NO: 1849 - RNA, 20 nt, Artificial Sequence
  Description of Artificial Sequence: Synthetic oligonucleotide
gaaaacauaggggaaggcuu

SEQ ID NO: 1850 - RNA, 20 nt, Artificial Sequence
  Description of Artificial Sequence: Synthetic oligonucleotide
caauacuauacagagaggaa

SEQ ID NO: 1851 - RNA, 20 nt, Artificial Sequence
  Description of Artificial Sequence: Synthetic oligonucleotide
cccaugcauuucuagucaaa

SEQ ID NO: 1852 - RNA, 20 nt, Artificial Sequence
  Description of Artificial Sequence: Synthetic oligonucleotide
uauaacuaguaaacagagau

SEQ ID NO: 1853 - RNA, 20 nt, Artificial Sequence
  Description of Artificial Sequence: Synthetic oligonucleotide
aauguacaccuagcaaaacg

SEQ ID NO: 1854 - RNA, 20 nt, Artificial Sequence
  Description of Artificial Sequence: Synthetic oligonucleotide
uaaauauagaacugaagaca

SEQ ID NO: 1855 - RNA, 20 nt, Artificial Sequence
  Description of Artificial Sequence: Synthetic oligonucleotide
uaaaccaaauaguagcagaa

SEQ ID NO: 1856 - RNA, 20 nt, Artificial Sequence
  Description of Artificial Sequence: Synthetic oligonucleotide
cuuacucuuacccaaccaau

SEQ ID NO: 1857 - RNA, 20 nt, Artificial Sequence
  Description of Artificial Sequence: Synthetic oligonucleotide
ggaaggggugguuagaauau

SEQ ID NO: 1858 - RNA, 20 nt, Artificial Sequence
  Description of Artificial Sequence: Synthetic oligonucleotide
uggaaggggugguuagaaua

SEQ ID NO: 1859 - RNA, 20 nt, Artificial Sequence
  Description of Artificial Sequence: Synthetic oligonucleotide
ggaaaaaugacaguuggaag

SEQ ID NO: 1860 - RNA, 20 nt, Artificial Sequence
  Description of Artificial Sequence: Synthetic oligonucleotide
caacagggaaaaaugacagu

SEQ ID NO: 1861 - RNA, 20 nt, Artificial Sequence
  Description of Artificial Sequence: Synthetic oligonucleotide
aacaaagucuucagaaacuu

SEQ ID NO: 1862 - RNA, 20 nt, Artificial Sequence
  Description of Artificial Sequence: Synthetic oligonucleotide
auuccuaacaagguacacaa

SEQ ID NO: 1863 - RNA, 20 nt, Artificial Sequence
  Description of Artificial Sequence: Synthetic oligonucleotide
uuuauuuugcauuccuaaca

SEQ ID NO: 1864 - RNA, 20 nt, Artificial Sequence
  Description of Artificial Sequence: Synthetic oligonucleotide
uacauguaaguuagauuacg

SEQ ID NO: 1865 - RNA, 20 nt, Artificial Sequence
  Description of Artificial Sequence: Synthetic oligonucleotide
ugucuaaaaugugcugguuu

SEQ ID NO: 1866 - RNA, 20 nt, Artificial Sequence
  Description of Artificial Sequence: Synthetic oligonucleotide
aaugugcugguuuagguuug

SEQ ID NO: 1867 - RNA, 20 nt, Artificial Sequence
  Description of Artificial Sequence: Synthetic oligonucleotide
augugcugguuuagguuugu

SEQ ID NO: 1868 - RNA, 20 nt, Artificial Sequence
  Description of Artificial Sequence: Synthetic oligonucleotide
ugugcugguuuagguuugug

SEQ ID NO: 1869 - RNA, 20 nt, Artificial Sequence
  Description of Artificial Sequence: Synthetic oligonucleotide
ggggaacaaaugcaguuaaa

SEQ ID NO: 1870 - RNA, 20 nt, Artificial Sequence
  Description of Artificial Sequence: Synthetic oligonucleotide
acaagguaugcacacacaga

SEQ ID NO: 1871 - RNA, 20 nt, Artificial Sequence
  Description of Artificial Sequence: Synthetic oligonucleotide
aaguucucaaggagauaaac

SEQ ID NO: 1872 - RNA, 20 nt, Artificial Sequence
  Description of Artificial Sequence: Synthetic oligonucleotide
accaguaucagggagaagca

SEQ ID NO: 1873 - RNA, 20 nt, Artificial Sequence
  Description of Artificial Sequence: Synthetic oligonucleotide
gccagcacccaccaguauca

SEQ ID NO: 1874 - RNA, 20 nt, Artificial Sequence
  Description of Artificial Sequence: Synthetic oligonucleotide
caccaacccagaaguggaca

SEQ ID NO: 1875 - RNA, 20 nt, Artificial Sequence
  Description of Artificial Sequence: Synthetic oligonucleotide
aggcccccauguccacuucu

SEQ ID NO: 1876 - RNA, 20 nt, Artificial Sequence
  Description of Artificial Sequence: Synthetic oligonucleotide
ccccauguccacuucugggu

SEQ ID NO: 1877 - RNA, 20 nt, Artificial Sequence
  Description of Artificial Sequence: Synthetic oligonucleotide
cauguccacuucuggguugg

SEQ ID NO: 1878 - RNA, 20 nt, Artificial Sequence
  Description of Artificial Sequence: Synthetic oligonucleotide
gagaacagagguaggugugg

SEQ ID NO: 1879 - RNA, 20 nt, Artificial Sequence
  Description of Artificial Sequence: Synthetic oligonucleotide
aagagucacaagcuaguuuc

SEQ ID NO: 1880 - RNA, 20 nt, Artificial Sequence
  Description of Artificial Sequence: Synthetic oligonucleotide
agcuaguuucagguaugggg

SEQ ID NO: 1881 - RNA, 20 nt, Artificial Sequence
  Description of Artificial Sequence: Synthetic oligonucleotide
ggaggagauauguagagugu

SEQ ID NO: 1882 - RNA, 20 nt, Artificial Sequence
  Description of Artificial Sequence: Synthetic oligonucleotide
augcauguucaguggauugu

SEQ ID NO: 1883 - RNA, 20 nt, Artificial Sequence
  Description of Artificial Sequence: Synthetic oligonucleotide
ggcuauuaugauaauuacug

SEQ ID NO: 1884 - RNA, 20 nt, Artificial Sequence
  Description of Artificial Sequence: Synthetic oligonucleotide
uuucauuaauuuuaauagua

SEQ ID NO: 1885 - RNA, 20 nt, Artificial Sequence
  Description of Artificial Sequence: Synthetic oligonucleotide
uuuccuaaagauuaaaauga

SEQ ID NO: 1886 - RNA, 20 nt, Artificial Sequence
  Description of Artificial Sequence: Synthetic oligonucleotide
augaugguauucugguugaa

SEQ ID NO: 1887 - RNA, 20 nt, Artificial Sequence
  Description of Artificial Sequence: Synthetic oligonucleotide
agaaauacacacaaugacca

SEQ ID NO: 1888 - RNA, 20 nt, Artificial Sequence
  Description of Artificial Sequence: Synthetic oligonucleotide
uuaaauguacauaucaaggu

SEQ ID NO: 1889 - RNA, 20 nt, Artificial Sequence
  Description of Artificial Sequence: Synthetic oligonucleotide
uuuacucccaucaaaucaac

SEQ ID NO: 1890 - RNA, 20 nt, Artificial Sequence
  Description of Artificial Sequence: Synthetic oligonucleotide
aaauuauaacuaucacauug

SEQ ID NO: 1891 - RNA, 20 nt, Artificial Sequence
  Description of Artificial Sequence: Synthetic oligonucleotide
uaacauuuuagaauauucac

SEQ ID NO: 1892 - RNA, 20 nt, Artificial Sequence
  Description of Artificial Sequence: Synthetic oligonucleotide
aaggaagcacuuucccaaau

SEQ ID NO: 1893 - RNA, 20 nt, Artificial Sequence
  Description of Artificial Sequence: Synthetic oligonucleotide
aucagaaugcuauauuagag

SEQ ID NO: 1894 - RNA, 20 nt, Artificial Sequence
  Description of Artificial Sequence: Synthetic oligonucleotide
uauuuauugguaagugaaua

SEQ ID NO: 1895 - RNA, 20 nt, Artificial Sequence
  Description of Artificial Sequence: Synthetic oligonucleotide
uggcuucaaaauggaaacaa

SEQ ID NO: 1896 - RNA, 20 nt, Artificial Sequence
  Description of Artificial Sequence: Synthetic oligonucleotide
uuuuugacagcugaaacauc

SEQ ID NO: 1897 - RNA, 20 nt, Artificial Sequence
  Description of Artificial Sequence: Synthetic oligonucleotide
aguucaguaauaugcacuga

SEQ ID NO: 1898 - RNA, 20 nt, Artificial Sequence
  Description of Artificial Sequence: Synthetic oligonucleotide
cugaaggaaaucucagucag

SEQ ID NO: 1899 - RNA, 20 nt, Artificial Sequence
  Description of Artificial Sequence: Synthetic oligonucleotide
ggaaaucucagucagugguu

SEQ ID NO: 1900 - RNA, 20 nt, Artificial Sequence
  Description of Artificial Sequence: Synthetic oligonucleotide
uuuuucuacacaacaagagg

SEQ ID NO: 1901 - RNA, 20 nt, Artificial Sequence
  Description of Artificial Sequence: Synthetic oligonucleotide
gccuauguaucuucuuaaag

SEQ ID NO: 1902 - RNA, 20 nt, Artificial Sequence
  Description of Artificial Sequence: Synthetic oligonucleotide
agccauucuuuuguacuuga

SEQ ID NO: 1903 - RNA, 20 nt, Artificial Sequence
  Description of Artificial Sequence: Synthetic oligonucleotide
uuguacuugaaggucuuauu

SEQ ID NO: 1904 - RNA, 20 nt, Artificial Sequence
  Description of Artificial Sequence: Synthetic oligonucleotide
cuauguuugauauugcuugu

SEQ ID NO: 1905 - RNA, 20 nt, Artificial Sequence
  Description of Artificial Sequence: Synthetic oligonucleotide
cuggaagcggggaaagcaca

SEQ ID NO: 1906 - RNA, 20 nt, Artificial Sequence
  Description of Artificial Sequence: Synthetic oligonucleotide
ucagaaagaugauuacuuca

SEQ ID NO: 1907 - RNA, 20 nt, Artificial Sequence
  Description of Artificial Sequence: Synthetic oligonucleotide
guauaaaaaaguuagcaagu

SEQ ID NO: 1908 - RNA, 20 nt, Artificial Sequence
  Description of Artificial Sequence: Synthetic oligonucleotide
ugggggacaauuaaagagac

SEQ ID NO: 1909 - RNA, 20 nt, Artificial Sequence
  Description of Artificial Sequence: Synthetic oligonucleotide
auguaguaaaccuuauaaca

SEQ ID NO: 1910 - RNA, 20 nt, Artificial Sequence
  Description of Artificial Sequence: Synthetic oligonucleotide
ucagcauucuggcauagcua

SEQ ID NO: 1911 - RNA, 20 nt, Artificial Sequence
  Description of Artificial Sequence: Synthetic oligonucleotide
auguaccuaggacuagaacu

SEQ ID NO: 1912 - RNA, 20 nt, Artificial Sequence
  Description of Artificial Sequence: Synthetic oligonucleotide
gaaagugacaacauguaccu

SEQ ID NO: 1913 - RNA, 20 nt, Artificial Sequence
  Description of Artificial Sequence: Synthetic oligonucleotide
acaacuagcaaagaggucuc

SEQ ID NO: 1914 - RNA, 20 nt, Artificial Sequence
  Description of Artificial Sequence: Synthetic oligonucleotide
uaagcugacaacuagcaaag

SEQ ID NO: 1915 - RNA, 20 nt, Artificial Sequence
  Description of Artificial Sequence: Synthetic oligonucleotide
uagagauucagaaugcuagc

SEQ ID NO: 1916 - RNA, 20 nt, Artificial Sequence
  Description of Artificial Sequence: Synthetic oligonucleotide
uucagaaugcuagcuggaau

SEQ ID NO: 1917 - RNA, 20 nt, Artificial Sequence
  Description of Artificial Sequence: Synthetic oligonucleotide
aaugcuagcuggaaugggau

SEQ ID NO: 1918 - RNA, 20 nt, Artificial Sequence
  Description of Artificial Sequence: Synthetic oligonucleotide
augcuagcuggaaugggaug

SEQ ID NO: 1919 - RNA, 20 nt, Artificial Sequence
  Description of Artificial Sequence: Synthetic oligonucleotide
ugcuagcuggaaugggaugg

SEQ ID NO: 1920 - RNA, 20 nt, Artificial Sequence
  Description of Artificial Sequence: Synthetic oligonucleotide
auuggcacuugaguugcugu

SEQ ID NO: 1921 - RNA, 20 nt, Artificial Sequence
  Description of Artificial Sequence: Synthetic oligonucleotide
aacuggauugaaugaagacu

SEQ ID NO: 1922 - RNA, 20 nt, Artificial Sequence
  Description of Artificial Sequence: Synthetic oligonucleotide
acuaauacaaguagaagauu

SEQ ID NO: 1923 - RNA, 20 nt, Artificial Sequence
  Description of Artificial Sequence: Synthetic oligonucleotide
auagcaagcuuccuaagcug

SEQ ID NO: 1924 - RNA, 20 nt, Artificial Sequence
  Description of Artificial Sequence: Synthetic oligonucleotide
uuuuaaagcauuuugacuag

SEQ ID NO: 1925 - RNA, 20 nt, Artificial Sequence
  Description of Artificial Sequence: Synthetic oligonucleotide
cuagagggcaaucaagcuuc

SEQ ID NO: 1926 - RNA, 20 nt, Artificial Sequence
  Description of Artificial Sequence: Synthetic oligonucleotide
cuugcuuuggacuugcuaga

SEQ ID NO: 1927 - RNA, 20 nt, Artificial Sequence
  Description of Artificial Sequence: Synthetic oligonucleotide
ucuugcuuuggacuugcuag

SEQ ID NO: 1928 - RNA, 20 nt, Artificial Sequence
  Description of Artificial Sequence: Synthetic oligonucleotide
aagaagagguucuuccccac

SEQ ID NO: 1929 - RNA, 20 nt, Artificial Sequence
  Description of Artificial Sequence: Synthetic oligonucleotide
agcaacaaauugaucccugu

SEQ ID NO: 1930 - RNA, 20 nt, Artificial Sequence
  Description of Artificial Sequence: Synthetic oligonucleotide
aagcaacaaauugaucccug

SEQ ID NO: 1931 - RNA, 20 nt, Artificial Sequence
  Description of Artificial Sequence: Synthetic oligonucleotide
aacucuguguucaaacauua

SEQ ID NO: 1932 - RNA, 20 nt, Artificial Sequence
  Description of Artificial Sequence: Synthetic oligonucleotide
uucuuaccguauauagaccu

SEQ ID NO: 1933 - RNA, 20 nt, Artificial Sequence
  Description of Artificial Sequence: Synthetic oligonucleotide
acuaaacacacuucacaauc

SEQ ID NO: 1934 - RNA, 20 nt, Artificial Sequence
  Description of Artificial Sequence: Synthetic oligonucleotide
uuuguggagacauguaaguu

SEQ ID NO: 1935 - RNA, 20 nt, Artificial Sequence
  Description of Artificial Sequence: Synthetic oligonucleotide
agacgaagacucugcaacgg

SEQ ID NO: 1936 - RNA, 20 nt, Artificial Sequence
  Description of Artificial Sequence: Synthetic oligonucleotide
ugaagacgaagacucugcaa

SEQ ID NO: 1937 - RNA, 20 nt, Artificial Sequence
  Description of Artificial Sequence: Synthetic oligonucleotide
cauaaagaauuucaaauccu

SEQ ID NO: 1938 - RNA, 20 nt, Artificial Sequence
  Description of Artificial Sequence: Synthetic oligonucleotide
ucuuuuucaugcuacaacaa

SEQ ID NO: 1939 - RNA, 20 nt, Artificial Sequence
  Description of Artificial Sequence: Synthetic oligonucleotide
cagcuauuuuugguaacuua

SEQ ID NO: 1940 - RNA, 20 nt, Artificial Sequence
  Description of Artificial Sequence: Synthetic oligonucleotide
uuuauuacaucagaaguuaa

SEQ ID NO: 1941 - RNA, 20 nt, Artificial Sequence
  Description of Artificial Sequence: Synthetic oligonucleotide
cacaaagguauguuaauuga

SEQ ID NO: 1942 - RNA, 20 nt, Artificial Sequence
  Description of Artificial Sequence: Synthetic oligonucleotide
auccuaaaaaaauaguauga

SEQ ID NO: 1943 - RNA, 20 nt, Artificial Sequence
  Description of Artificial Sequence: Synthetic oligonucleotide
augaaccuaauauuuaguaa

SEQ ID NO: 1944 - RNA, 20 nt, Artificial Sequence
  Description of Artificial Sequence: Synthetic oligonucleotide
auaguacuuuaaacauaucu

SEQ ID NO: 1945 - RNA, 20 nt, Artificial Sequence
  Description of Artificial Sequence: Synthetic oligonucleotide
uugacccuucauaucugaag

SEQ ID NO: 1946 - RNA, 20 nt, Artificial Sequence
  Description of Artificial Sequence: Synthetic oligonucleotide
guugacccuucauaucugaa

SEQ ID NO: 1947 - RNA, 20 nt, Artificial Sequence
  Description of Artificial Sequence: Synthetic oligonucleotide
caucucuuaaaacucacccu

SEQ ID NO: 1948 - RNA, 20 nt, Artificial Sequence
  Description of Artificial Sequence: Synthetic oligonucleotide
uaacagcacagugaaaccaa

SEQ ID NO: 1949 - RNA, 20 nt, Artificial Sequence
  Description of Artificial Sequence: Synthetic oligonucleotide
ugcuguuaaauuuguuuaaa

SEQ ID NO: 1950 - RNA, 20 nt, Artificial Sequence
  Description of Artificial Sequence: Synthetic oligonucleotide
uuuuauacuaaagacaagca

SEQ ID NO: 1951 - RNA, 20 nt, Artificial Sequence
  Description of Artificial Sequence: Synthetic oligonucleotide
uuugccgcuuagccuuuguu

SEQ ID NO: 1952 - RNA, 20 nt, Artificial Sequence
  Description of Artificial Sequence: Synthetic oligonucleotide
uaucauuccaauaugugaac

SEQ ID NO: 1953 - RNA, 20 nt, Artificial Sequence
  Description of Artificial Sequence: Synthetic oligonucleotide
agaauauuagauuucaauaa

SEQ ID NO: 1954 - RNA, 20 nt, Artificial Sequence
  Description of Artificial Sequence: Synthetic oligonucleotide
auaacuaguugcaugguacu

SEQ ID NO: 1955 - RNA, 20 nt, Artificial Sequence
  Description of Artificial Sequence: Synthetic oligonucleotide
uuguacuauaacuaguugca

SEQ ID NO: 1956 - RNA, 20 nt, Artificial Sequence
  Description of Artificial Sequence: Synthetic oligonucleotide
uacacuauacuacucagacu

SEQ ID NO: 1957 - RNA, 20 nt, Artificial Sequence
  Description of Artificial Sequence: Synthetic oligonucleotide
uccuuaaaaacguccuccuc

SEQ ID NO: 1958 - RNA, 20 nt, Artificial Sequence
  Description of Artificial Sequence: Synthetic oligonucleotide
uucacauuuuaccacagcuu

SEQ ID NO: 1959 - RNA, 20 nt, Artificial Sequence
  Description of Artificial Sequence: Synthetic oligonucleotide
caguuugaaaaaauagcaca

SEQ ID NO: 1960 - RNA, 20 nt, Artificial Sequence
  Description of Artificial Sequence: Synthetic oligonucleotide
gccucaaauaucuacuuuaa

SEQ ID NO: 1961 - RNA, 20 nt, Artificial Sequence
  Description of Artificial Sequence: Synthetic oligonucleotide
accauuaaaguagauauuug

SEQ ID NO: 1962 - RNA, 20 nt, Artificial Sequence
  Description of Artificial Sequence: Synthetic oligonucleotide
guagauauuugaaacuuuua

SEQ ID NO: 1963 - RNA, 20 nt, Artificial Sequence
  Description of Artificial Sequence: Synthetic oligonucleotide
acaaaaauuuacugagccca

SEQ ID NO: 1964 - RNA, 20 nt, Artificial Sequence
  Description of Artificial Sequence: Synthetic oligonucleotide
ucaucugauguuuuaugaau

SEQ ID NO: 1965 - RNA, 20 nt, Artificial Sequence
  Description of Artificial Sequence: Synthetic oligonucleotide
cuucucuccuaaaacuuuua

SEQ ID NO: 1966 - RNA, 20 nt, Artificial Sequence
  Description of Artificial Sequence: Synthetic oligonucleotide
accuaucccauaaaaguuuu

SEQ ID NO: 1967 - RNA, 20 nt, Artificial Sequence
  Description of Artificial Sequence: Synthetic oligonucleotide
ucaucuauagagggcacugc

SEQ ID NO: 1968 - RNA, 20 nt, Artificial Sequence
  Description of Artificial Sequence: Synthetic oligonucleotide
ggcucuucuauuuuuuaaac

SEQ ID NO: 1969 - RNA, 20 nt, Artificial Sequence
  Description of Artificial Sequence: Synthetic oligonucleotide
uaacauaagaaauacuacac

SEQ ID NO: 1970 - RNA, 20 nt, Artificial Sequence
  Description of Artificial Sequence: Synthetic oligonucleotide
ugagaguauaauacauaaau

SEQ ID NO: 1971 - RNA, 20 nt, Artificial Sequence
  Description of Artificial Sequence: Synthetic oligonucleotide
caauaaauaacaaauauguc

SEQ ID NO: 1972 - RNA, 20 nt, Artificial Sequence
  Description of Artificial Sequence: Synthetic oligonucleotide
aaaaauuaccaauggggaug

SEQ ID NO: 1973 - RNA, 20 nt, Artificial Sequence
  Description of Artificial Sequence: Synthetic oligonucleotide
gaucuccaccucauccccau

SEQ ID NO: 1974 - RNA, 20 nt, Artificial Sequence
  Description of Artificial Sequence: Synthetic oligonucleotide
cucaggagcaggagaaacgg

SEQ ID NO: 1975 - RNA, 20 nt, Artificial Sequence
  Description of Artificial Sequence: Synthetic oligonucleotide
gaccucaggagcaggagaaa

SEQ ID NO: 1976 - RNA, 20 nt, Artificial Sequence
  Description of Artificial Sequence: Synthetic oligonucleotide
gcaaaucauguuaucuaaca

SEQ ID NO: 1977 - RNA, 20 nt, Artificial Sequence
  Description of Artificial Sequence: Synthetic oligonucleotide
gaaaugaugaaaaaagggcc

SEQ ID NO: 1978 - RNA, 20 nt, Artificial Sequence
  Description of Artificial Sequence: Synthetic oligonucleotide
cuuucaaucagauagaaacc

SEQ ID NO: 1979 - RNA, 20 nt, Artificial Sequence
  Description of Artificial Sequence: Synthetic oligonucleotide
agccagagcacuuaggggag

SEQ ID NO: 1980 - RNA, 20 nt, Artificial Sequence
  Description of Artificial Sequence: Synthetic oligonucleotide
uagccagagcacuuagggga

SEQ ID NO: 1981 - RNA, 20 nt, Artificial Sequence
  Description of Artificial Sequence: Synthetic oligonucleotide
cuagccagagcacuuagggg

SEQ ID NO: 1982 - RNA, 20 nt, Artificial Sequence
  Description of Artificial Sequence: Synthetic oligonucleotide
uuccuagccagagcacuuag

SEQ ID NO: 1983 - RNA, 20 nt, Artificial Sequence
  Description of Artificial Sequence: Synthetic oligonucleotide
aauuccaaucuaaaugacuc

SEQ ID NO: 1984 - RNA, 20 nt, Artificial Sequence
  Description of Artificial Sequence: Synthetic oligonucleotide
agcugugcuucagauaaacu

SEQ ID NO: 1985 - RNA, 20 nt, Artificial Sequence
  Description of Artificial Sequence: Synthetic oligonucleotide
caauagaaaaccuguauuca

SEQ ID NO: 1986 - RNA, 20 nt, Artificial Sequence
  Description of Artificial Sequence: Synthetic oligonucleotide
gagguuuucgcauccacugg

SEQ ID NO: 1987 - RNA, 20 nt, Artificial Sequence
  Description of Artificial Sequence: Synthetic oligonucleotide
uagaauguaauaacaagaug

SEQ ID NO: 1988 - RNA, 20 nt, Artificial Sequence
  Description of Artificial Sequence: Synthetic oligonucleotide
guuugcuguggcaaguaaau

SEQ ID NO: 1989 - RNA, 20 nt, Artificial Sequence
  Description of Artificial Sequence: Synthetic oligonucleotide
uucuuuuccugaauacuuua

SEQ ID NO: 1990 - RNA, 20 nt, Artificial Sequence
  Description of Artificial Sequence: Synthetic oligonucleotide
aagguauccuuaaaguauuc

SEQ ID NO: 1991 - RNA, 20 nt, Artificial Sequence
  Description of Artificial Sequence: Synthetic oligonucleotide
cuaauauauuucgguuuugg

SEQ ID NO: 1992 - RNA, 20 nt, Artificial Sequence
  Description of Artificial Sequence: Synthetic oligonucleotide
ucuaauauauuucgguuuug

SEQ ID NO: 1993 - RNA, 20 nt, Artificial Sequence
  Description of Artificial Sequence: Synthetic oligonucleotide
uucuaauauauuucgguuuu

SEQ ID NO: 1994 - RNA, 20 nt, Artificial Sequence
  Description of Artificial Sequence: Synthetic oligonucleotide
gucaaaauauaguauugcau

SEQ ID NO: 1995 - RNA, 20 nt, Artificial Sequence
  Description of Artificial Sequence: Synthetic oligonucleotide
uauuguaaauuauaucucau

SEQ ID NO: 1996 - RNA, 20 nt, Artificial Sequence
  Description of Artificial Sequence: Synthetic oligonucleotide
aucaguacauuuacauaccu

SEQ ID NO: 1997 - RNA, 20 nt, Artificial Sequence
  Description of Artificial Sequence: Synthetic oligonucleotide
guuauuuuguaggaauuugc

SEQ ID NO: 1998 - RNA, 20 nt, Artificial Sequence
  Description of Artificial Sequence: Synthetic oligonucleotide
cuacaaaauaacugaucaug

SEQ ID NO: 1999 - RNA, 20 nt, Artificial Sequence
  Description of Artificial Sequence: Synthetic oligonucleotide
guauaucacuaauugagaua

SEQ ID NO: 2000 - RNA, 20 nt, Artificial Sequence
  Description of Artificial Sequence: Synthetic oligonucleotide
ucuuuuugugcacucacugg

SEQ ID NO: 2001 - RNA, 20 nt, Artificial Sequence
  Description of Artificial Sequence: Synthetic oligonucleotide
ugugcacucacugguggcua

SEQ ID NO: 2002 - RNA, 20 nt, Artificial Sequence
  Description of Artificial Sequence: Synthetic oligonucleotide
gugcacucacugguggcuag

SEQ ID NO: 2003 - RNA, 20 nt, Artificial Sequence
  Description of Artificial Sequence: Synthetic oligonucleotide
acucacugguggcuaggggc

SEQ ID NO: 2004 - RNA, 20 nt, Artificial Sequence
  Description of Artificial Sequence: Synthetic oligonucleotide
aaccaguugaaguuaauaaa

SEQ ID NO: 2005 - RNA, 20 nt, Artificial Sequence
  Description of Artificial Sequence: Synthetic oligonucleotide
cccugauaucagucaauuau

SEQ ID NO: 2006 - RNA, 20 nt, Artificial Sequence
  Description of Artificial Sequence: Synthetic oligonucleotide
ccuauaauugacugauauca

SEQ ID NO: 2007 - RNA, 20 nt, Artificial Sequence
  Description of Artificial Sequence: Synthetic oligonucleotide
guugucuguguuccuucauu

SEQ ID NO: 2008 - RNA, 20 nt, Artificial Sequence
  Description of Artificial Sequence: Synthetic oligonucleotide
ugcuguuuugaacaacuaaa

SEQ ID NO: 2009 - RNA, 20 nt, Artificial Sequence
  Description of Artificial Sequence: Synthetic oligonucleotide
agcauaugcaauagaagaca

SEQ ID NO: 2010 - RNA, 20 nt, Artificial Sequence
  Description of Artificial Sequence: Synthetic oligonucleotide
cccauucucuuggaaucaca

SEQ ID NO: 2011 - RNA, 20 nt, Artificial Sequence
  Description of Artificial Sequence: Synthetic oligonucleotide
uuuuggaacuuaggaccauu

SEQ ID NO: 2012 - RNA, 20 nt, Artificial Sequence
  Description of Artificial Sequence: Synthetic oligonucleotide
ugacaaaugcucuuacagaa

SEQ ID NO: 2013 - RNA, 20 nt, Artificial Sequence
  Description of Artificial Sequence: Synthetic oligonucleotide
caaaggaacuugacacagag

SEQ ID NO: 2014 - RNA, 20 nt, Artificial Sequence
  Description of Artificial Sequence: Synthetic oligonucleotide
acauguuccucuucaccaua

SEQ ID NO: 2015 - RNA, 20 nt, Artificial Sequence
  Description of Artificial Sequence: Synthetic oligonucleotide
aaucuuuuauacaguugaaa

SEQ ID NO: 2016 - RNA, 20 nt, Artificial Sequence
  Description of Artificial Sequence: Synthetic oligonucleotide
cuaaucauuuucugcaccac

SEQ ID NO: 2017 - RNA, 20 nt, Artificial Sequence
  Description of Artificial Sequence: Synthetic oligonucleotide
ucacgugauaggagcacuuu

SEQ ID NO: 2018 - RNA, 20 nt, Artificial Sequence
  Description of Artificial Sequence: Synthetic oligonucleotide
cucacgugauaggagcacuu

SEQ ID NO: 2019 - RNA, 20 nt, Artificial Sequence
  Description of Artificial Sequence: Synthetic oligonucleotide
acuauuucucgacuaugcuc

SEQ ID NO: 2020 - RNA, 20 nt, Artificial Sequence
  Description of Artificial Sequence: Synthetic oligonucleotide
agucugaaguagaggcggac

SEQ ID NO: 2021 - RNA, 20 nt, Artificial Sequence
  Description of Artificial Sequence: Synthetic oligonucleotide
aucuguuucagauuucuucu

SEQ ID NO: 2022 - RNA, 20 nt, Artificial Sequence
  Description of Artificial Sequence: Synthetic oligonucleotide
uaacaaaguccugcaagugg

SEQ ID NO: 2023 - RNA, 20 nt, Artificial Sequence
  Description of Artificial Sequence: Synthetic oligonucleotide
uuuuaacaaaguccugcaag

SEQ ID NO: 2024 - RNA, 20 nt, Artificial Sequence
  Description of Artificial Sequence: Synthetic oligonucleotide
aaagcaacuuaugucuucua

SEQ ID NO: 2025 - RNA, 20 nt, Artificial Sequence
  Description of Artificial Sequence: Synthetic oligonucleotide
auagaagaggucuuuuuuuu

SEQ ID NO: 2026 - RNA, 20 nt, Artificial Sequence
  Description of Artificial Sequence: Synthetic oligonucleotide
gcuauacuggaauauuauac

SEQ ID NO: 2027 - RNA, 20 nt, Artificial Sequence
  Description of Artificial Sequence: Synthetic oligonucleotide
uuuugauagaaaccuccuuu

SEQ ID NO: 2028 - RNA, 20 nt, Artificial Sequence
  Description of Artificial Sequence: Synthetic oligonucleotide
uucucacauuuagacaaaga

SEQ ID NO: 2029 - RNA, 20 nt, Artificial Sequence
  Description of Artificial Sequence: Synthetic oligonucleotide
guguaauguauuguuuucua

SEQ ID NO: 2030 - RNA, 20 nt, Artificial Sequence
  Description of Artificial Sequence: Synthetic oligonucleotide
gucauggaguguuuacuuug

SEQ ID NO: 2031 - RNA, 20 nt, Artificial Sequence
  Description of Artificial Sequence: Synthetic oligonucleotide
auaggggguuucuggguugc

SEQ ID NO: 2032 - RNA, 20 nt, Artificial Sequence
  Description of Artificial Sequence: Synthetic oligonucleotide
aagagacauaggggguuucu

SEQ ID NO: 2033 - RNA, 20 nt, Artificial Sequence
  Description of Artificial Sequence: Synthetic oligonucleotide
gucaggcaagugguuaaccu

SEQ ID NO: 2034 - RNA, 20 nt, Artificial Sequence
  Description of Artificial Sequence: Synthetic oligonucleotide
agucaggcaagugguuaacc

SEQ ID NO: 2035 - RNA, 20 nt, Artificial Sequence
  Description of Artificial Sequence: Synthetic oligonucleotide
auuugucauguuacuguagg

SEQ ID NO: 2036 - RNA, 20 nt, Artificial Sequence
  Description of Artificial Sequence: Synthetic oligonucleotide
ucauguuacuguaggagguu

SEQ ID NO: 2037 - RNA, 20 nt, Artificial Sequence
  Description of Artificial Sequence: Synthetic oligonucleotide
cauguuacuguaggagguuu

SEQ ID NO: 2038 - RNA, 20 nt, Artificial Sequence
  Description of Artificial Sequence: Synthetic oligonucleotide
aaugacccagauucuagucu

SEQ ID NO: 2039 - RNA, 20 nt, Artificial Sequence
  Description of Artificial Sequence: Synthetic oligonucleotide
ucagaagacuaaaauuaaag

SEQ ID NO: 2040 - RNA, 20 nt, Artificial Sequence
  Description of Artificial Sequence: Synthetic oligonucleotide
aaaggguauucaauuccauu

SEQ ID NO: 2041 - RNA, 20 nt, Artificial Sequence
  Description of Artificial Sequence: Synthetic oligonucleotide
aaacuaugcuucucuacuag

SEQ ID NO: 2042 - RNA, 20 nt, Artificial Sequence
  Description of Artificial Sequence: Synthetic oligonucleotide
agaugugugguuagagagga

SEQ ID NO: 2043 - RNA, 20 nt, Artificial Sequence
  Description of Artificial Sequence: Synthetic oligonucleotide
ugggagaugugugguuagag

SEQ ID NO: 2044 - RNA, 20 nt, Artificial Sequence
  Description of Artificial Sequence: Synthetic oligonucleotide
caaaugucccacccagaugg

SEQ ID NO: 2045 - RNA, 20 nt, Artificial Sequence
  Description of Artificial Sequence: Synthetic oligonucleotide
cacaucucccaccaucuggg

SEQ ID NO: 2046 - RNA, 20 nt, Artificial Sequence
  Description of Artificial Sequence: Synthetic oligonucleotide
acaucucccaccaucugggu

SEQ ID NO: 2047 - RNA, 20 nt, Artificial Sequence
  Description of Artificial Sequence: Synthetic oligonucleotide
cuuagcauucuguacauugu

SEQ ID NO: 2048 - RNA, 20 nt, Artificial Sequence
  Description of Artificial Sequence: Synthetic oligonucleotide
auacauucacauguaagaaa

SEQ ID NO: 2049 - RNA, 20 nt, Artificial Sequence
  Description of Artificial Sequence: Synthetic oligonucleotide
agacaaaaguagaccaaugg

SEQ ID NO: 2050 - RNA, 20 nt, Artificial Sequence
  Description of Artificial Sequence: Synthetic oligonucleotide
gauagacaaaaguagaccaa

SEQ ID NO: 2051 - RNA, 20 nt, Artificial Sequence
  Description of Artificial Sequence: Synthetic oligonucleotide
cugauaugaauaaaaauuua

SEQ ID NO: 2052 - RNA, 20 nt, Artificial Sequence
  Description of Artificial Sequence: Synthetic oligonucleotide
gucugagugagcuaaauaaa

SEQ ID NO: 2053 - RNA, 20 nt, Artificial Sequence
  Description of Artificial Sequence: Synthetic oligonucleotide
ccacugaacagaaaauuauc

SEQ ID NO: 2054 - RNA, 20 nt, Artificial Sequence
  Description of Artificial Sequence: Synthetic oligonucleotide
ucacacuggguaaguacuac

SEQ ID NO: 2055 - RNA, 20 nt, Artificial Sequence
  Description of Artificial Sequence: Synthetic oligonucleotide
caguaaauauuguucucaac

SEQ ID NO: 2056 - RNA, 20 nt, Artificial Sequence
  Description of Artificial Sequence: Synthetic oligonucleotide
ugugaguuguggggcccagg

SEQ ID NO: 2057 - RNA, 20 nt, Artificial Sequence
  Description of Artificial Sequence: Synthetic oligonucleotide
agugugaguuguggggccca

SEQ ID NO: 2058 - RNA, 20 nt, Artificial Sequence
  Description of Artificial Sequence: Synthetic oligonucleotide
aagugugaguuguggggccc

SEQ ID NO: 2059 - RNA, 20 nt, Artificial Sequence
  Description of Artificial Sequence: Synthetic oligonucleotide
ucugaaaagugugaguugug

SEQ ID NO: 2060 - RNA, 20 nt, Artificial Sequence
  Description of Artificial Sequence: Synthetic oligonucleotide
gucugaaaagugugaguugu

SEQ ID NO: 2061 - RNA, 20 nt, Artificial Sequence
  Description of Artificial Sequence: Synthetic oligonucleotide
ggucugaaaagugugaguug

SEQ ID NO: 2062 - RNA, 20 nt, Artificial Sequence
  Description of Artificial Sequence: Synthetic oligonucleotide
gcugugaucucuaggacaug

SEQ ID NO: 2063 - RNA, 20 nt, Artificial Sequence
  Description of Artificial Sequence: Synthetic oligonucleotide
guugaguaagggguacagua

SEQ ID NO: 2064 - RNA, 20 nt, Artificial Sequence
  Description of Artificial Sequence: Synthetic oligonucleotide
agaauaaaaagcgauacaag

SEQ ID NO: 2065 - RNA, 20 nt, Artificial Sequence
  Description of Artificial Sequence: Synthetic oligonucleotide
uugcuagucuuuuuggaugg

SEQ ID NO: 2066 - RNA, 20 nt, Artificial Sequence
  Description of Artificial Sequence: Synthetic oligonucleotide
gguguucuugcuagucuuuu

SEQ ID NO: 2067 - RNA, 20 nt, Artificial Sequence
  Description of Artificial Sequence: Synthetic oligonucleotide
uaaaaaaugugcucaacuac

SEQ ID NO: 2068 - RNA, 20 nt, Artificial Sequence
  Description of Artificial Sequence: Synthetic oligonucleotide
guggugcauuuuaagagcuu

SEQ ID NO: 2069 - RNA, 20 nt, Artificial Sequence
  Description of Artificial Sequence: Synthetic oligonucleotide
aaaucuucuacucgcugaau

SEQ ID NO: 2070 - RNA, 20 nt, Artificial Sequence
  Description of Artificial Sequence: Synthetic oligonucleotide
uuuagaaacuagagagcuag

SEQ ID NO: 2071 - RNA, 20 nt, Artificial Sequence
  Description of Artificial Sequence: Synthetic oligonucleotide
uuacuuuaccaggugaugga

SEQ ID NO: 2072 - RNA, 20 nt, Artificial Sequence
  Description of Artificial Sequence: Synthetic oligonucleotide
aagguuacuuuaccagguga

SEQ ID NO: 2073 - RNA, 20 nt, Artificial Sequence
  Description of Artificial Sequence: Synthetic oligonucleotide
agcucucagaaggcaugggu

SEQ ID NO: 2074 - RNA, 20 nt, Artificial Sequence
  Description of Artificial Sequence: Synthetic oligonucleotide
ccaggacuaugcgguuucac

SEQ ID NO: 2075 - RNA, 20 nt, Artificial Sequence
  Description of Artificial Sequence: Synthetic oligonucleotide
ugaaaaaucaggaauagaag

SEQ ID NO: 2076 - RNA, 20 nt, Artificial Sequence
  Description of Artificial Sequence: Synthetic oligonucleotide
ccaucucacuuuaugccuua

SEQ ID NO: 2077 - RNA, 20 nt, Artificial Sequence
  Description of Artificial Sequence: Synthetic oligonucleotide
acagaugagauuuaguauga

SEQ ID NO: 2078 - RNA, 20 nt, Artificial Sequence
  Description of Artificial Sequence: Synthetic oligonucleotide
ucauacuaaaucucaucugu

SEQ ID NO: 2079 - RNA, 20 nt, Artificial Sequence
  Description of Artificial Sequence: Synthetic oligonucleotide
cauacuaaaucucaucugug

SEQ ID NO: 2080 - RNA, 20 nt, Artificial Sequence
  Description of Artificial Sequence: Synthetic oligonucleotide
cuuggauugggcaugguuug

SEQ ID NO: 2081 - RNA, 20 nt, Artificial Sequence
  Description of Artificial Sequence: Synthetic oligonucleotide
ucacuaucuuggauugggca

SEQ ID NO: 2082 - RNA, 20 nt, Artificial Sequence
  Description of Artificial Sequence: Synthetic oligonucleotide
aucaauucaguucacuaucu

SEQ ID NO: 2083 - RNA, 20 nt, Artificial Sequence
  Description of Artificial Sequence: Synthetic oligonucleotide
caaacuuggcuaaauguuug

SEQ ID NO: 2084 - RNA, 20 nt, Artificial Sequence
  Description of Artificial Sequence: Synthetic oligonucleotide
aucuacacugaaaaaucugu

SEQ ID NO: 2085 - RNA, 20 nt, Artificial Sequence
  Description of Artificial Sequence: Synthetic oligonucleotide
agaggguccgccugucucuc

SEQ ID NO: 2086 - RNA, 20 nt, Artificial Sequence
  Description of Artificial Sequence: Synthetic oligonucleotide
aaauguacuuagugacuuca

SEQ ID NO: 2087 - RNA, 20 nt, Artificial Sequence
  Description of Artificial Sequence: Synthetic oligonucleotide
ccuaugggguagggggugaa

SEQ ID NO: 2088 - RNA, 20 nt, Artificial Sequence
  Description of Artificial Sequence: Synthetic oligonucleotide
acauggagaggggaacacac

SEQ ID NO: 2089 - RNA, 20 nt, Artificial Sequence
  Description of Artificial Sequence: Synthetic oligonucleotide
cauuuaacagacauggagag

SEQ ID NO: 2090 - RNA, 20 nt, Artificial Sequence
  Description of Artificial Sequence: Synthetic oligonucleotide
ucaccuucuuuaccaauuac

SEQ ID NO: 2091 - RNA, 20 nt, Artificial Sequence
  Description of Artificial Sequence: Synthetic oligonucleotide
acuacacuuagauacaucac

SEQ ID NO: 2092 - RNA, 20 nt, Artificial Sequence
  Description of Artificial Sequence: Synthetic oligonucleotide
ccaacaucuaguuggaaucc

SEQ ID NO: 2093 - RNA, 20 nt, Artificial Sequence
  Description of Artificial Sequence: Synthetic oligonucleotide
aguauauugaaugaagcaag

SEQ ID NO: 2094 - RNA, 20 nt, Artificial Sequence
  Description of Artificial Sequence: Synthetic oligonucleotide
ucacuguagaccauaugcuc

SEQ ID NO: 2095 - RNA, 20 nt, Artificial Sequence
  Description of Artificial Sequence: Synthetic oligonucleotide
agaccacugaucaaacauau

SEQ ID NO: 2096 - RNA, 20 nt, Artificial Sequence
  Description of Artificial Sequence: Synthetic oligonucleotide
uuacugacaaagggucaccu

SEQ ID NO: 2097 - RNA, 20 nt, Artificial Sequence
  Description of Artificial Sequence: Synthetic oligonucleotide
aagccauuuuuacugacaaa

SEQ ID NO: 2098 - RNA, 20 nt, Artificial Sequence
  Description of Artificial Sequence: Synthetic oligonucleotide
cugaauuuuaauucuaagac

SEQ ID NO: 2099 - RNA, 20 nt, Artificial Sequence
  Description of Artificial Sequence: Synthetic oligonucleotide
auugcagcaaagcacauaau

SEQ ID NO: 2100 - RNA, 20 nt, Artificial Sequence
  Description of Artificial Sequence: Synthetic oligonucleotide
uauuaugugcuuugcugcaa

SEQ ID NO: 2101 - RNA, 20 nt, Artificial Sequence
  Description of Artificial Sequence: Synthetic oligonucleotide
gagcuccuuaggcagacaga

SEQ ID NO: 2102 - RNA, 20 nt, Artificial Sequence
  Description of Artificial Sequence: Synthetic oligonucleotide
uugcuaacugaauaccucaa

SEQ ID NO: 2103 - RNA, 20 nt, Artificial Sequence
  Description of Artificial Sequence: Synthetic oligonucleotide
cauggcaaacuauuucaucu

SEQ ID NO: 2104 - RNA, 20 nt, Artificial Sequence
  Description of Artificial Sequence: Synthetic oligonucleotide
agcauugacuauuccucaga

SEQ ID NO: 2105 - RNA, 20 nt, Artificial Sequence
  Description of Artificial Sequence: Synthetic oligonucleotide
acuucaucagcugacuaauc

SEQ ID NO: 2106 - RNA, 20 nt, Artificial Sequence
  Description of Artificial Sequence: Synthetic oligonucleotide
aaggcugcuagauauguguu

SEQ ID NO: 2107 - RNA, 20 nt, Artificial Sequence
  Description of Artificial Sequence: Synthetic oligonucleotide
aggcugcuagauauguguuu

SEQ ID NO: 2108 - RNA, 20 nt, Artificial Sequence
  Description of Artificial Sequence: Synthetic oligonucleotide
cucuuucccuaaaauugauc

SEQ ID NO: 2109 - RNA, 20 nt, Artificial Sequence
  Description of Artificial Sequence: Synthetic oligonucleotide
aaaucaacagccacagaggg

SEQ ID NO: 2110 - RNA, 20 nt, Artificial Sequence
  Description of Artificial Sequence: Synthetic oligonucleotide
augaacaacaaaaaggauuc

SEQ ID NO: 2111 - RNA, 20 nt, Artificial Sequence
  Description of Artificial Sequence: Synthetic oligonucleotide
caacaaaaaggauucaggaa

SEQ ID NO: 2112 - RNA, 20 nt, Artificial Sequence
  Description of Artificial Sequence: Synthetic oligonucleotide
aaggauucaggaacgguguu

SEQ ID NO: 2113 - RNA, 20 nt, Artificial Sequence
  Description of Artificial Sequence: Synthetic oligonucleotide
ggauucccaguauguggcua

SEQ ID NO: 2114 - RNA, 20 nt, Artificial Sequence
  Description of Artificial Sequence: Synthetic oligonucleotide
uggaguuugguauucuugca

SEQ ID NO: 2115 - RNA, 20 nt, Artificial Sequence
  Description of Artificial Sequence: Synthetic oligonucleotide
uuuggcauuuacacuguagu

SEQ ID NO: 2116 - RNA, 20 nt, Artificial Sequence
  Description of Artificial Sequence: Synthetic oligonucleotide
aauauacuuggcucucucug

SEQ ID NO: 2117 - RNA, 20 nt, Artificial Sequence
  Description of Artificial Sequence: Synthetic oligonucleotide
acaaguaucuuaauuuagga

SEQ ID NO: 2118 - RNA, 20 nt, Artificial Sequence
  Description of Artificial Sequence: Synthetic oligonucleotide
gaugauaauuggauuuuuuc

SEQ ID NO: 2119 - RNA, 20 nt, Artificial Sequence
  Description of Artificial Sequence: Synthetic oligonucleotide
uuuacaauuuaaucuauuga

SEQ ID NO: 2120 - RNA, 20 nt, Artificial Sequence
  Description of Artificial Sequence: Synthetic oligonucleotide
uuugaaaaacuuaauuacug

SEQ ID NO: 2121 - RNA, 20 nt, Artificial Sequence
  Description of Artificial Sequence: Synthetic oligonucleotide
uuaauuacugagguauuaga

SEQ ID NO: 2122 - RNA, 20 nt, Artificial Sequence
  Description of Artificial Sequence: Synthetic oligonucleotide
agcaugucuagccugaugcu

SEQ ID NO: 2123 - RNA, 20 nt, Artificial Sequence
  Description of Artificial Sequence: Synthetic oligonucleotide
caggcuagacaugcugguaa

SEQ ID NO: 2124 - RNA, 20 nt, Artificial Sequence
  Description of Artificial Sequence: Synthetic oligonucleotide
gauugguucuaaaaaccugg

SEQ ID NO: 2125 - RNA, 20 nt, Artificial Sequence
  Description of Artificial Sequence: Synthetic oligonucleotide
gcugauugguucuaaaaacc

SEQ ID NO: 2126 - RNA, 20 nt, Artificial Sequence
  Description of Artificial Sequence: Synthetic oligonucleotide
gccuuaacagauuguuaaug

SEQ ID NO: 2127 - RNA, 20 nt, Artificial Sequence
  Description of Artificial Sequence: Synthetic oligonucleotide
gacugcaaaugcaaacaugg

SEQ ID NO: 2128 - RNA, 20 nt, Artificial Sequence
  Description of Artificial Sequence: Synthetic oligonucleotide
caugacugcaaaugcaaaca

SEQ ID NO: 2129 - RNA, 20 nt, Artificial Sequence
  Description of Artificial Sequence: Synthetic oligonucleotide
aguaugcacaacaaaguuag

SEQ ID NO: 2130 - RNA, 20 nt, Artificial Sequence
  Description of Artificial Sequence: Synthetic oligonucleotide
auguauauuccacaggauca

SEQ ID NO: 2131 - RNA, 20 nt, Artificial Sequence
  Description of Artificial Sequence: Synthetic oligonucleotide
uugauccuguggaauauaca

SEQ ID NO: 2132 - RNA, 20 nt, Artificial Sequence
  Description of Artificial Sequence: Synthetic oligonucleotide
aagcaaauagauaucugacu

SEQ ID NO: 2133 - RNA, 20 nt, Artificial Sequence
  Description of Artificial Sequence: Synthetic oligonucleotide
auaauuguugugaaauuuau

SEQ ID NO: 2134 - RNA, 20 nt, Artificial Sequence
  Description of Artificial Sequence: Synthetic oligonucleotide
aaucauugucauuguaaguc

SEQ ID NO: 2135 - RNA, 20 nt, Artificial Sequence
  Description of Artificial Sequence: Synthetic oligonucleotide
gugagaguguucaaaguccu

SEQ ID NO: 2136 - RNA, 20 nt, Artificial Sequence
  Description of Artificial Sequence: Synthetic oligonucleotide
uggcauaauacuuucugugg

SEQ ID NO: 2137 - RNA, 20 nt, Artificial Sequence
  Description of Artificial Sequence: Synthetic oligonucleotide
uaugucaaucccauacucca

SEQ ID NO: 2138 - RNA, 20 nt, Artificial Sequence
  Description of Artificial Sequence: Synthetic oligonucleotide
guaugucaaucccauacucc

SEQ ID NO: 2139 - RNA, 20 nt, Artificial Sequence
  Description of Artificial Sequence: Synthetic oligonucleotide
uugaccacauuuguguaaca

SEQ ID NO: 2140 - RNA, 20 nt, Artificial Sequence
  Description of Artificial Sequence: Synthetic oligonucleotide
uaugacuuaguacucuccuu

SEQ ID NO: 2141 - RNA, 20 nt, Artificial Sequence
  Description of Artificial Sequence: Synthetic oligonucleotide
uaaauuacagcugcaaccaa

SEQ ID NO: 2142 - RNA, 20 nt, Artificial Sequence
  Description of Artificial Sequence: Synthetic oligonucleotide
cuaaugaagaauucugcaac

SEQ ID NO: 2143 - RNA, 20 nt, Artificial Sequence
  Description of Artificial Sequence: Synthetic oligonucleotide
uuuaaaguuaugucuuugua

SEQ ID NO: 2144 - RNA, 20 nt, Artificial Sequence
  Description of Artificial Sequence: Synthetic oligonucleotide
cuguguggaugaaggcaagg

SEQ ID NO: 2145 - RNA, 20 nt, Artificial Sequence
  Description of Artificial Sequence: Synthetic oligonucleotide
uaacuguguggaugaaggca

SEQ ID NO: 2146 - RNA, 20 nt, Artificial Sequence
  Description of Artificial Sequence: Synthetic oligonucleotide
cuugaguuauuagguguuua

SEQ ID NO: 2147 - RNA, 20 nt, Artificial Sequence
  Description of Artificial Sequence: Synthetic oligonucleotide
ugaggaugguacauggcauc

SEQ ID NO: 2148 - RNA, 20 nt, Artificial Sequence
  Description of Artificial Sequence: Synthetic oligonucleotide
guuaacuaaaggauuauuuc

SEQ ID NO: 2149 - RNA, 20 nt, Artificial Sequence
  Description of Artificial Sequence: Synthetic oligonucleotide
cagacaggaauauggaguug

SEQ ID NO: 2150 - RNA, 20 nt, Artificial Sequence
  Description of Artificial Sequence: Synthetic oligonucleotide
uugucaagaacauuacagac

SEQ ID NO: 2151 - RNA, 20 nt, Artificial Sequence
  Description of Artificial Sequence: Synthetic oligonucleotide
aaccauuuuauuauuuggcu

SEQ ID NO: 2152 - RNA, 20 nt, Artificial Sequence
  Description of Artificial Sequence: Synthetic oligonucleotide
cuucucuugaagugugcacu

SEQ ID NO: 2153 - RNA, 20 nt, Artificial Sequence
  Description of Artificial Sequence: Synthetic oligonucleotide
caaguagguuaacauuuugu

SEQ ID NO: 2154 - RNA, 20 nt, Artificial Sequence
  Description of Artificial Sequence: Synthetic oligonucleotide
gcaaguagguuaacauuuug

SEQ ID NO: 2155 - RNA, 20 nt, Artificial Sequence
  Description of Artificial Sequence: Synthetic oligonucleotide
uaauuguauuuauugcaagu

SEQ ID NO: 2156 - RNA, 20 nt, Artificial Sequence
  Description of Artificial Sequence: Synthetic oligonucleotide
ucugaauuacugagugaccu

SEQ ID NO: 2157 - RNA, 20 nt, Artificial Sequence
  Description of Artificial Sequence: Synthetic oligonucleotide
accuaggaagcuugcucaga

SEQ ID NO: 2158 - RNA, 20 nt, Artificial Sequence
  Description of Artificial Sequence: Synthetic oligonucleotide
gcacuaaaaaaauuguacaa

SEQ ID NO: 2159 - RNA, 20 nt, Artificial Sequence
  Description of Artificial Sequence: Synthetic oligonucleotide
ugcucacaguauauaacuag

SEQ ID NO: 2160 - RNA, 20 nt, Artificial Sequence
  Description of Artificial Sequence: Synthetic oligonucleotide
uaugguuauaugauuauaug

SEQ ID NO: 2161 - RNA, 20 nt, Artificial Sequence
  Description of Artificial Sequence: Synthetic oligonucleotide
auauacauuugacuauacaa

SEQ ID NO: 2162 - RNA, 20 nt, Artificial Sequence
  Description of Artificial Sequence: Synthetic oligonucleotide
aguugaaaaacuauuugaga

SEQ ID NO: 2163 - RNA, 20 nt, Artificial Sequence
  Description of Artificial Sequence: Synthetic oligonucleotide
uguuggguuauguggcaucu

SEQ ID NO: 2164 - RNA, 20 nt, Artificial Sequence
  Description of Artificial Sequence: Synthetic oligonucleotide
caacagauuuugaugaucca

SEQ ID NO: 2165 - RNA, 20 nt, Artificial Sequence
  Description of Artificial Sequence: Synthetic oligonucleotide
caaguagauuaacguuuugu

SEQ ID NO: 2166 - RNA, 20 nt, Artificial Sequence
  Description of Artificial Sequence: Synthetic oligonucleotide
aauuacucaugaacagaaaa

SEQ ID NO: 2167 - RNA, 20 nt, Artificial Sequence
  Description of Artificial Sequence: Synthetic oligonucleotide
aggaagcuuucuaggucacu

SEQ ID NO: 2168 - RNA, 20 nt, Artificial Sequence
  Description of Artificial Sequence: Synthetic oligonucleotide
guugacuuaggaagcuuucu

SEQ ID NO: 2169 - RNA, 20 nt, Artificial Sequence
  Description of Artificial Sequence: Synthetic oligonucleotide
auuuuauuauguggauguga

SEQ ID NO: 2170 - RNA, 20 nt, Artificial Sequence
  Description of Artificial Sequence: Synthetic oligonucleotide
ggagacugcauccucauuac

SEQ ID NO: 2171 - RNA, 20 nt, Artificial Sequence
  Description of Artificial Sequence: Synthetic oligonucleotide
augagaacaucaugucagcu

SEQ ID NO: 2172 - RNA, 20 nt, Artificial Sequence
  Description of Artificial Sequence: Synthetic oligonucleotide
ugguguuagagguuuagaga

SEQ ID NO: 2173 - RNA, 20 nt, Artificial Sequence
  Description of Artificial Sequence: Synthetic oligonucleotide
cccaucuguucugguguuag

SEQ ID NO: 2174 - RNA, 20 nt, Artificial Sequence
  Description of Artificial Sequence: Synthetic oligonucleotide
uauguuccacccaucuguuc

SEQ ID NO: 2175 - RNA, 20 nt, Artificial Sequence
  Description of Artificial Sequence: Synthetic oligonucleotide
ccucuaacaccagaacagau

SEQ ID NO: 2176 - RNA, 20 nt, Artificial Sequence
  Description of Artificial Sequence: Synthetic oligonucleotide
cuaacaccagaacagauggg

SEQ ID NO: 2177 - RNA, 20 nt, Artificial Sequence
  Description of Artificial Sequence: Synthetic oligonucleotide
gauggguggaacauagaaca

SEQ ID NO: 2178 - RNA, 20 nt, Artificial Sequence
  Description of Artificial Sequence: Synthetic oligonucleotide
ggaagguuuuaccucugagg

SEQ ID NO: 2179 - RNA, 20 nt, Artificial Sequence
  Description of Artificial Sequence: Synthetic oligonucleotide
guaaauucaguguuaaugag

SEQ ID NO: 2180 - RNA, 20 nt, Artificial Sequence
  Description of Artificial Sequence: Synthetic oligonucleotide
aagcaauguugcuaacgaag

SEQ ID NO: 2181 - RNA, 20 nt, Artificial Sequence
  Description of Artificial Sequence: Synthetic oligonucleotide
acuuauuauaaucacagagg

SEQ ID NO: 2182 - RNA, 20 nt, Artificial Sequence
  Description of Artificial Sequence: Synthetic oligonucleotide
uauaauaagugggaacggaa

SEQ ID NO: 2183 - RNA, 20 nt, Artificial Sequence
  Description of Artificial Sequence: Synthetic oligonucleotide
aaagggugugcaaaugucaa

SEQ ID NO: 2184 - RNA, 20 nt, Artificial Sequence
  Description of Artificial Sequence: Synthetic oligonucleotide
cauaaacauguguuaggaaa

SEQ ID NO: 2185 - RNA, 20 nt, Artificial Sequence
  Description of Artificial Sequence: Synthetic oligonucleotide
acauaaacauguguuaggaa

SEQ ID NO: 2186 - RNA, 20 nt, Artificial Sequence
  Description of Artificial Sequence: Synthetic oligonucleotide
gugaugcauuagcaccauuu

SEQ ID NO: 2187 - RNA, 20 nt, Artificial Sequence
  Description of Artificial Sequence: Synthetic oligonucleotide
uugagauuggcaaacuucug

SEQ ID NO: 2188 - RNA, 20 nt, Artificial Sequence
  Description of Artificial Sequence: Synthetic oligonucleotide
uuagaauucuguuuugagau

SEQ ID NO: 2189 - RNA, 20 nt, Artificial Sequence
  Description of Artificial Sequence: Synthetic oligonucleotide
agaauucuaaaaccuacgag

SEQ ID NO: 2190 - RNA, 20 nt, Artificial Sequence
  Description of Artificial Sequence: Synthetic oligonucleotide
caugaaauugguacccuuaa

SEQ ID NO: 2191 - RNA, 20 nt, Artificial Sequence
  Description of Artificial Sequence: Synthetic oligonucleotide
uuucuaaauguuagauugua

SEQ ID NO: 2192 - RNA, 20 nt, Artificial Sequence
  Description of Artificial Sequence: Synthetic oligonucleotide
uaauacuauuuuagggcaac

SEQ ID NO: 2193 - RNA, 20 nt, Artificial Sequence
  Description of Artificial Sequence: Synthetic oligonucleotide
uuccuguauuccagauauaa

SEQ ID NO: 2194 - RNA, 20 nt, Artificial Sequence
  Description of Artificial Sequence: Synthetic oligonucleotide
guauuaacuaauugaaguac

SEQ ID NO: 2195 - RNA, 20 nt, Artificial Sequence
  Description of Artificial Sequence: Synthetic oligonucleotide
acuucaauuaguuaauaccu

SEQ ID NO: 2196 - RNA, 20 nt, Artificial Sequence
  Description of Artificial Sequence: Synthetic oligonucleotide
accugggguugccaaauagc

SEQ ID NO: 2197 - RNA, 20 nt, Artificial Sequence
  Description of Artificial Sequence: Synthetic oligonucleotide
ugauggaacuuguguuugaa

SEQ ID NO: 2198 - RNA, 20 nt, Artificial Sequence
  Description of Artificial Sequence: Synthetic oligonucleotide
aguuuuguuccuaugaaauu

SEQ ID NO: 2199 - RNA, 20 nt, Artificial Sequence
  Description of Artificial Sequence: Synthetic oligonucleotide
augggguauccaaauuucau

SEQ ID NO: 2200 - RNA, 20 nt, Artificial Sequence
  Description of Artificial Sequence: Synthetic oligonucleotide
aucacuugccauaggugcuc

SEQ ID NO: 2201 - RNA, 20 nt, Artificial Sequence
  Description of Artificial Sequence: Synthetic oligonucleotide
ccuaguacaucacuugccau

SEQ ID NO: 2202 - RNA, 20 nt, Artificial Sequence
  Description of Artificial Sequence: Synthetic oligonucleotide
gcucuuagaaauggccacau

SEQ ID NO: 2203 - RNA, 20 nt, Artificial Sequence
  Description of Artificial Sequence: Synthetic oligonucleotide
auguggccauuucuaagagc

SEQ ID NO: 2204 - RNA, 20 nt, Artificial Sequence
  Description of Artificial Sequence: Synthetic oligonucleotide
aggaaaaaaacagguugcaa

SEQ ID NO: 2205 - RNA, 20 nt, Artificial Sequence
  Description of Artificial Sequence: Synthetic oligonucleotide
caagggaacuuuucauagug

SEQ ID NO: 2206 - RNA, 20 nt, Artificial Sequence
  Description of Artificial Sequence: Synthetic oligonucleotide
cuagaccaccagaucauaag

SEQ ID NO: 2207 - RNA, 20 nt, Artificial Sequence
  Description of Artificial Sequence: Synthetic oligonucleotide
uauguggggccucaaauucu

SEQ ID NO: 2208 - RNA, 20 nt, Artificial Sequence
  Description of Artificial Sequence: Synthetic oligonucleotide
augucaaacuuucauaugug

SEQ ID NO: 2209 - RNA, 20 nt, Artificial Sequence
  Description of Artificial Sequence: Synthetic oligonucleotide
uuuuacaauugauagaaugu

SEQ ID NO: 2210 - RNA, 20 nt, Artificial Sequence
  Description of Artificial Sequence: Synthetic oligonucleotide
uuuacaauugauagaauguu

SEQ ID NO: 2211 - RNA, 20 nt, Artificial Sequence
  Description of Artificial Sequence: Synthetic oligonucleotide
caauaaaguuauuuacugaa

SEQ ID NO: 2212 - RNA, 20 nt, Artificial Sequence
  Description of Artificial Sequence: Synthetic oligonucleotide
acuuauaaguucauuccuga

SEQ ID NO: 2213 - RNA, 20 nt, Artificial Sequence
  Description of Artificial Sequence: Synthetic oligonucleotide
gaaaauucuuucacuuaagu

SEQ ID NO: 2214 - RNA, 20 nt, Artificial Sequence
  Description of Artificial Sequence: Synthetic oligonucleotide
gcaacauacacaaacacacu

SEQ ID NO: 2215 - RNA, 20 nt, Artificial Sequence
  Description of Artificial Sequence: Synthetic oligonucleotide
uuaauauuguucuucaugcu

SEQ ID NO: 2216 - RNA, 20 nt, Artificial Sequence
  Description of Artificial Sequence: Synthetic oligonucleotide
aaaaauacuauuagaaugua

SEQ ID NO: 2217 - RNA, 20 nt, Artificial Sequence
  Description of Artificial Sequence: Synthetic oligonucleotide
aaaugggcuugccaacaaua

SEQ ID NO: 2218 - RNA, 20 nt, Artificial Sequence
  Description of Artificial Sequence: Synthetic oligonucleotide
uuuaucucagacaaagagag

SEQ ID NO: 2219 - RNA, 20 nt, Artificial Sequence
  Description of Artificial Sequence: Synthetic oligonucleotide
aaugauguuugacaaucuuu

SEQ ID NO: 2220 - RNA, 20 nt, Artificial Sequence
  Description of Artificial Sequence: Synthetic oligonucleotide
ucugccugaagaacugucaa

SEQ ID NO: 2221 - RNA, 20 nt, Artificial Sequence
  Description of Artificial Sequence: Synthetic oligonucleotide
acuagacuggccuccacuua

SEQ ID NO: 2222 - RNA, 20 nt, Artificial Sequence
  Description of Artificial Sequence: Synthetic oligonucleotide
cauguauaaauagacuagac

SEQ ID NO: 2223 - RNA, 20 nt, Artificial Sequence
  Description of Artificial Sequence: Synthetic oligonucleotide
guuaaggaggagugugaaac

SEQ ID NO: 2224 - RNA, 20 nt, Artificial Sequence
  Description of Artificial Sequence: Synthetic oligonucleotide
cauauuggaagucuuaguua

SEQ ID NO: 2225 - RNA, 20 nt, Artificial Sequence
  Description of Artificial Sequence: Synthetic oligonucleotide
agaaucuuguucaacuuuga

SEQ ID NO: 2226 - RNA, 20 nt, Artificial Sequence
  Description of Artificial Sequence: Synthetic oligonucleotide
ugguguugacuugcuuucug

SEQ ID NO: 2227 - RNA, 20 nt, Artificial Sequence
  Description of Artificial Sequence: Synthetic oligonucleotide
uagguaguuuuuuauuggaa

SEQ ID NO: 2228 - RNA, 20 nt, Artificial Sequence
  Description of Artificial Sequence: Synthetic oligonucleotide
caaccaacugaagcagaggu

SEQ ID NO: 2229 - RNA, 20 nt, Artificial Sequence
  Description of Artificial Sequence: Synthetic oligonucleotide
cuaccuaccucugcuucagu

SEQ ID NO: 2230 - RNA, 20 nt, Artificial Sequence
  Description of Artificial Sequence: Synthetic oligonucleotide
gugacauucagaauucagua

SEQ ID NO: 2231 - RNA, 20 nt, Artificial Sequence
  Description of Artificial Sequence: Synthetic oligonucleotide
gggaguaauauaaagucaga

SEQ ID NO: 2232 - RNA, 20 nt, Artificial Sequence
  Description of Artificial Sequence: Synthetic oligonucleotide
cacuuuaauaaaucaaguag

SEQ ID NO: 2233 - RNA, 20 nt, Artificial Sequence
  Description of Artificial Sequence: Synthetic oligonucleotide
ugauugugucaauacaguaa

SEQ ID NO: 2234 - RNA, 20 nt, Artificial Sequence
  Description of Artificial Sequence: Synthetic oligonucleotide
acaguaacgggaauuuccuc

SEQ ID NO: 2235 - RNA, 20 nt, Artificial Sequence
  Description of Artificial Sequence: Synthetic oligonucleotide
ccucagguacagauggauuu

SEQ ID NO: 2236 - RNA, 20 nt, Artificial Sequence
  Description of Artificial Sequence: Synthetic oligonucleotide
ugaugaagacuuagaaucug

SEQ ID NO: 2237 - RNA, 20 nt, Artificial Sequence
  Description of Artificial Sequence: Synthetic oligonucleotide
auuuauaacccagauaagug

SEQ ID NO: 2238 - RNA, 20 nt, Artificial Sequence
  Description of Artificial Sequence: Synthetic oligonucleotide
ucacauugcacuuuguacag

SEQ ID NO: 2239 - RNA, 20 nt, Artificial Sequence
  Description of Artificial Sequence: Synthetic oligonucleotide
uucacauugcacuuuguaca

SEQ ID NO: 2240 - RNA, 20 nt, Artificial Sequence
  Description of Artificial Sequence: Synthetic oligonucleotide
gauacaucauaugccugugg

SEQ ID NO: 2241 - RNA, 20 nt, Artificial Sequence
  Description of Artificial Sequence: Synthetic oligonucleotide
auaugauguaucauuuagau

SEQ ID NO: 2242 - RNA, 20 nt, Artificial Sequence
  Description of Artificial Sequence: Synthetic oligonucleotide
cucuacaagcauauggccuu

SEQ ID NO: 2243 - RNA, 20 nt, Artificial Sequence
  Description of Artificial Sequence: Synthetic oligonucleotide
augcuuguagagaaugugga

SEQ ID NO: 2244 - RNA, 20 nt, Artificial Sequence
  Description of Artificial Sequence: Synthetic oligonucleotide
cauguugcacaaauguuuua

SEQ ID NO: 2245 - RNA, 20 nt, Artificial Sequence
  Description of Artificial Sequence: Synthetic oligonucleotide
gcauguugcacaaauguuuu

SEQ ID NO: 2246 - RNA, 20 nt, Artificial Sequence
  Description of Artificial Sequence: Synthetic oligonucleotide
guaccuuuuaucuuuuucau

SEQ ID NO: 2247 - RNA, 20 nt, Artificial Sequence
  Description of Artificial Sequence: Synthetic oligonucleotide
ugccaucgaggcauugcaca

SEQ ID NO: 2248 - RNA, 20 nt, Artificial Sequence
  Description of Artificial Sequence: Synthetic oligonucleotide
caauaucagaagugaccaua

SEQ ID NO: 2249 - RNA, 20 nt, Artificial Sequence
  Description of Artificial Sequence: Synthetic oligonucleotide
uucaugaaagacucuguagu

SEQ ID NO: 2250 - RNA, 20 nt, Artificial Sequence
  Description of Artificial Sequence: Synthetic oligonucleotide
aggacacaucuuacauaugu

SEQ ID NO: 2251 - RNA, 20 nt, Artificial Sequence
  Description of Artificial Sequence: Synthetic oligonucleotide
ucaucauguguugauucauu

SEQ ID NO: 2252 - RNA, 20 nt, Artificial Sequence
  Description of Artificial Sequence: Synthetic oligonucleotide
uuucuuuuaucaaguccaag

SEQ ID NO: 2253 - RNA, 20 nt, Artificial Sequence
  Description of Artificial Sequence: Synthetic oligonucleotide
ugaaaaacuacuugauugug

SEQ ID NO: 2254 - RNA, 20 nt, Artificial Sequence
  Description of Artificial Sequence: Synthetic oligonucleotide
gcugcuugauggaaauacuu

SEQ ID NO: 2255 - RNA, 20 nt, Artificial Sequence
  Description of Artificial Sequence: Synthetic oligonucleotide
caaauaguggcuauuugccu

SEQ ID NO: 2256 - RNA, 20 nt, Artificial Sequence
  Description of Artificial Sequence: Synthetic oligonucleotide
gacacaaauaugaaaacuau

SEQ ID NO: 2257 - RNA, 20 nt, Artificial Sequence
  Description of Artificial Sequence: Synthetic oligonucleotide
uuugaagcuuucaggccuuu

SEQ ID NO: 2258 - RNA, 20 nt, Artificial Sequence
  Description of Artificial Sequence: Synthetic oligonucleotide
agcuguaaagagaguaauua

SEQ ID NO: 2259 - RNA, 20 nt, Artificial Sequence
  Description of Artificial Sequence: Synthetic oligonucleotide
aaacagaagaugaaaguucc

SEQ ID NO: 2260 - RNA, 20 nt, Artificial Sequence
  Description of Artificial Sequence: Synthetic oligonucleotide
uccuaacucaacauuauccc

SEQ ID NO: 2261 - RNA, 20 nt, Artificial Sequence
  Description of Artificial Sequence: Synthetic oligonucleotide
acuauagguuucaucuucua

SEQ ID NO: 2262 - RNA, 20 nt, Artificial Sequence
  Description of Artificial Sequence: Synthetic oligonucleotide
cucuugauuaauaucacuau

SEQ ID NO: 2263 - RNA, 20 nt, Artificial Sequence
  Description of Artificial Sequence: Synthetic oligonucleotide
aaaguggaaggucaggagcc

SEQ ID NO: 2264 - RNA, 20 nt, Artificial Sequence
  Description of Artificial Sequence: Synthetic oligonucleotide
cuaagaguagcauuuucucc

SEQ ID NO: 2265 - RNA, 20 nt, Artificial Sequence
  Description of Artificial Sequence: Synthetic oligonucleotide
ucaaauguugcugggcagua

SEQ ID NO: 2266 - RNA, 20 nt, Artificial Sequence
  Description of Artificial Sequence: Synthetic oligonucleotide
acaccuguuucaaauguugc

SEQ ID NO: 2267 - RNA, 20 nt, Artificial Sequence
  Description of Artificial Sequence: Synthetic oligonucleotide
guucuggugauacaacauga

SEQ ID NO: 2268 - RNA, 20 nt, Artificial Sequence
  Description of Artificial Sequence: Synthetic oligonucleotide
augcagcauuucaaaagaac

SEQ ID NO: 2269 - RNA, 20 nt, Artificial Sequence
  Description of Artificial Sequence: Synthetic oligonucleotide
cauuucaaaagaacuggcac

SEQ ID NO: 2270 - RNA, 20 nt, Artificial Sequence
  Description of Artificial Sequence: Synthetic oligonucleotide
guucuccauggggaugauuu

SEQ ID NO: 2271 - RNA, 20 nt, Artificial Sequence
  Description of Artificial Sequence: Synthetic oligonucleotide
agaauuaacucauuuuaggg

SEQ ID NO: 2272 - RNA, 20 nt, Artificial Sequence
  Description of Artificial Sequence: Synthetic oligonucleotide
cacacuugucagcucugugg

SEQ ID NO: 2273 - RNA, 20 nt, Artificial Sequence
  Description of Artificial Sequence: Synthetic oligonucleotide
ggauuaucaaaucauguuag

SEQ ID NO: 2274 - RNA, 20 nt, Artificial Sequence
  Description of Artificial Sequence: Synthetic oligonucleotide
uuuugagcuacaaauggucu

SEQ ID NO: 2275 - RNA, 20 nt, Artificial Sequence
  Description of Artificial Sequence: Synthetic oligonucleotide
cugacagagcuucagucuuu

SEQ ID NO: 2276 - RNA, 20 nt, Artificial Sequence
  Description of Artificial Sequence: Synthetic oligonucleotide
uuuuucccacugggcaguuc

SEQ ID NO: 2277 - RNA, 20 nt, Artificial Sequence
  Description of Artificial Sequence: Synthetic oligonucleotide
augcguucuuccauuaaaug

SEQ ID NO: 2278 - RNA, 20 nt, Artificial Sequence
  Description of Artificial Sequence: Synthetic oligonucleotide
gauguaucagccacaaaaaa

SEQ ID NO: 2279 - RNA, 20 nt, Artificial Sequence
  Description of Artificial Sequence: Synthetic oligonucleotide
auggacuugacuaugcacuc

SEQ ID NO: 2280 - RNA, 20 nt, Artificial Sequence
  Description of Artificial Sequence: Synthetic oligonucleotide
ugacuaugcacucagguaag

SEQ ID NO: 2281 - RNA, 20 nt, Artificial Sequence
  Description of Artificial Sequence: Synthetic oligonucleotide
cacauagauuccauuaaaga

SEQ ID NO: 2282 - RNA, 20 nt, Artificial Sequence
  Description of Artificial Sequence: Synthetic oligonucleotide
auaaaacuugcucuggcugg

SEQ ID NO: 2283 - RNA, 20 nt, Artificial Sequence
  Description of Artificial Sequence: Synthetic oligonucleotide
cucuggcuggaggaugguug

SEQ ID NO: 2284 - RNA, 20 nt, Artificial Sequence
  Description of Artificial Sequence: Synthetic oligonucleotide
gcuggaggaugguuguggau

SEQ ID NO: 2285 - RNA, 20 nt, Artificial Sequence
  Description of Artificial Sequence: Synthetic oligonucleotide
ucuugaaaacaugaucaccu

SEQ ID NO: 2286 - RNA, 20 nt, Artificial Sequence
  Description of Artificial Sequence: Synthetic oligonucleotide
uguugguuuuuccacugcuu

SEQ ID NO: 2287 - RNA, 20 nt, Artificial Sequence
  Description of Artificial Sequence: Synthetic oligonucleotide
auacaaugaggaauuggaga

SEQ ID NO: 2288 - RNA, 20 nt, Artificial Sequence
  Description of Artificial Sequence: Synthetic oligonucleotide
gaacauaaaacauauuuguu

SEQ ID NO: 2289 - RNA, 20 nt, Artificial Sequence
  Description of Artificial Sequence: Synthetic oligonucleotide
agauagugcucuaauggaac

SEQ ID NO: 2290 - RNA, 20 nt, Artificial Sequence
  Description of Artificial Sequence: Synthetic oligonucleotide
uacaaaauauuccuuucaaa

SEQ ID NO: 2291 - RNA, 20 nt, Artificial Sequence
  Description of Artificial Sequence: Synthetic oligonucleotide
gugucagagguaauaguuaa

SEQ ID NO: 2292 - RNA, 20 nt, Artificial Sequence
  Description of Artificial Sequence: Synthetic oligonucleotide
guaauguuguuuauuugcuu

SEQ ID NO: 2293 - RNA, 20 nt, Artificial Sequence
  Description of Artificial Sequence: Synthetic oligonucleotide
aauguuguuuauuugcuuug

SEQ ID NO: 2294 - RNA, 20 nt, Artificial Sequence
  Description of Artificial Sequence: Synthetic oligonucleotide
agauaacuuuguauuguaag

SEQ ID NO: 2295 - RNA, 20 nt, Artificial Sequence
  Description of Artificial Sequence: Synthetic oligonucleotide
acuuuguauuguaagugguc

SEQ ID NO: 2296 - RNA, 20 nt, Artificial Sequence
  Description of Artificial Sequence: Synthetic oligonucleotide
uuuucagaaggguaaaacgc

SEQ ID NO: 2297 - RNA, 20 nt, Artificial Sequence
  Description of Artificial Sequence: Synthetic oligonucleotide
uuucagaaggguaaaacgca

SEQ ID NO: 2298 - RNA, 20 nt, Artificial Sequence
  Description of Artificial Sequence: Synthetic oligonucleotide
uguuagcuguguugaccaag

SEQ ID NO: 2299 - RNA, 20 nt, Artificial Sequence
  Description of Artificial Sequence: Synthetic oligonucleotide
gggguaguauacuucagaga

SEQ ID NO: 2300 - RNA, 20 nt, Artificial Sequence
  Description of Artificial Sequence: Synthetic oligonucleotide
agaaaccaguugaaaugugu

SEQ ID NO: 2301 - RNA, 20 nt, Artificial Sequence
  Description of Artificial Sequence: Synthetic oligonucleotide
gaaaccaguugaaauguguu

SEQ ID NO: 2302 - RNA, 20 nt, Artificial Sequence
  Description of Artificial Sequence: Synthetic oligonucleotide
aaaccaguugaaauguguug

SEQ ID NO: 2303 - RNA, 20 nt, Artificial Sequence
  Description of Artificial Sequence: Synthetic oligonucleotide
aaccaguugaaauguguugg

SEQ ID NO: 2304 - RNA, 20 nt, Artificial Sequence
  Description of Artificial Sequence: Synthetic oligonucleotide
ugugucuaacagcuguucag

SEQ ID NO: 2305 - RNA, 20 nt, Artificial Sequence
  Description of Artificial Sequence: Synthetic oligonucleotide
uaaauuaggcuuucugauga

SEQ ID NO: 2306 - RNA, 20 nt, Artificial Sequence
  Description of Artificial Sequence: Synthetic oligonucleotide
aaaagucucaauacuaaauu

SEQ ID NO: 2307 - RNA, 20 nt, Artificial Sequence
  Description of Artificial Sequence: Synthetic oligonucleotide
aucugcaagaaaguaauaau

SEQ ID NO: 2308 - RNA, 20 nt, Artificial Sequence
  Description of Artificial Sequence: Synthetic oligonucleotide
uagagucaacucaugcucuu

SEQ ID NO: 2309 - RNA, 20 nt, Artificial Sequence
  Description of Artificial Sequence: Synthetic oligonucleotide
agguuaacuuaaaauaagga

SEQ ID NO: 2310 - RNA, 20 nt, Artificial Sequence
  Description of Artificial Sequence: Synthetic oligonucleotide
uagguuaacuuaaaauaagg

SEQ ID NO: 2311 - RNA, 20 nt, Artificial Sequence
  Description of Artificial Sequence: Synthetic oligonucleotide
ucacuuuuugaagugagaac

SEQ ID NO: 2312 - RNA, 20 nt, Artificial Sequence
  Description of Artificial Sequence: Synthetic oligonucleotide
aagagugcuggacuuuugac

SEQ ID NO: 2313 - RNA, 20 nt, Artificial Sequence
  Description of Artificial Sequence: Synthetic oligonucleotide
gcucuuauugacuuaauuug

SEQ ID NO: 2314 - RNA, 20 nt, Artificial Sequence
  Description of Artificial Sequence: Synthetic oligonucleotide
cucaaaguuccacaccucuu

SEQ ID NO: 2315 - RNA, 20 nt, Artificial Sequence
  Description of Artificial Sequence: Synthetic oligonucleotide
uauaaagagagguguuuuac

SEQ ID NO: 2316 - RNA, 20 nt, Artificial Sequence
  Description of Artificial Sequence: Synthetic oligonucleotide
aauauuguaguucuagcuug

SEQ ID NO: 2317 - RNA, 20 nt, Artificial Sequence
  Description of Artificial Sequence: Synthetic oligonucleotide
uucaaaauguagacuugauu

SEQ ID NO: 2318 - RNA, 20 nt, Artificial Sequence
  Description of Artificial Sequence: Synthetic oligonucleotide
ucuauagauuagaucuuuga

SEQ ID NO: 2319 - RNA, 20 nt, Artificial Sequence
  Description of Artificial Sequence: Synthetic oligonucleotide
cuauagauuagaucuuugaa

SEQ ID NO: 2320 - RNA, 20 nt, Artificial Sequence
  Description of Artificial Sequence: Synthetic oligonucleotide
uauagauuagaucuuugaag

SEQ ID NO: 2321 - RNA, 20 nt, Artificial Sequence
  Description of Artificial Sequence: Synthetic oligonucleotide
gucaacacaagccauuauua

SEQ ID NO: 2322 - RNA, 20 nt, Artificial Sequence
  Description of Artificial Sequence: Synthetic oligonucleotide
cacagaugagcaguauuaag

SEQ ID NO: 2323 - RNA, 20 nt, Artificial Sequence
  Description of Artificial Sequence: Synthetic oligonucleotide
aaaugagauuugcugaagca

SEQ ID NO: 2324 - RNA, 20 nt, Artificial Sequence
  Description of Artificial Sequence: Synthetic oligonucleotide
ggguauauuuuaagauguga

SEQ ID NO: 2325 - RNA, 20 nt, Artificial Sequence
  Description of Artificial Sequence: Synthetic oligonucleotide
guagaucuaugucaaaaaga

SEQ ID NO: 2326 - RNA, 20 nt, Artificial Sequence
  Description of Artificial Sequence: Synthetic oligonucleotide
uguagaucuaugucaaaaag

SEQ ID NO: 2327 - RNA, 20 nt, Artificial Sequence
  Description of Artificial Sequence: Synthetic oligonucleotide
uuuugaaagcaagaacauau

SEQ ID NO: 2328 - RNA, 20 nt, Artificial Sequence
  Description of Artificial Sequence: Synthetic oligonucleotide
auauuaaaaagagaggagug

SEQ ID NO: 2329 - RNA, 20 nt, Artificial Sequence
  Description of Artificial Sequence: Synthetic oligonucleotide
aauuauaaucucagaguagg

SEQ ID NO: 2330 - RNA, 20 nt, Artificial Sequence
  Description of Artificial Sequence: Synthetic oligonucleotide
gccaagccugauaaagguga

SEQ ID NO: 2331 - RNA, 20 nt, Artificial Sequence
  Description of Artificial Sequence: Synthetic oligonucleotide
ugccaagccugauaaaggug

SEQ ID NO: 2332 - RNA, 20 nt, Artificial Sequence
  Description of Artificial Sequence: Synthetic oligonucleotide
ucacuugccaagccugauaa

SEQ ID NO: 2333 - RNA, 20 nt, Artificial Sequence
  Description of Artificial Sequence: Synthetic oligonucleotide
caagugauugcagacauuag

SEQ ID NO: 2334 - RNA, 20 nt, Artificial Sequence
  Description of Artificial Sequence: Synthetic oligonucleotide
gugauugcagacauuagagg

SEQ ID NO: 2335 - RNA, 20 nt, Artificial Sequence
  Description of Artificial Sequence: Synthetic oligonucleotide
aaauaagagacuauacaagu

SEQ ID NO: 2336 - RNA, 20 nt, Artificial Sequence
  Description of Artificial Sequence: Synthetic oligonucleotide
aauggaaaauucuaaaauga

SEQ ID NO: 2337 - RNA, 20 nt, Artificial Sequence
  Description of Artificial Sequence: Synthetic oligonucleotide
uuuaaacccaccuucaggcu

SEQ ID NO: 2338 - RNA, 20 nt, Artificial Sequence
  Description of Artificial Sequence: Synthetic oligonucleotide
cagagauccaagaagugcuu

SEQ ID NO: 2339 - RNA, 20 nt, Artificial Sequence
  Description of Artificial Sequence: Synthetic oligonucleotide
gauuaugcaaauauccaaua

SEQ ID NO: 2340 - RNA, 20 nt, Artificial Sequence
  Description of Artificial Sequence: Synthetic oligonucleotide
aaucuucauaagugcauucu

SEQ ID NO: 2341 - RNA, 20 nt, Artificial Sequence
  Description of Artificial Sequence: Synthetic oligonucleotide
aucagagagaaaaguaaugu

SEQ ID NO: 2342 - RNA, 20 nt, Artificial Sequence
  Description of Artificial Sequence: Synthetic oligonucleotide
gaaaaguaauguaggaugac

SEQ ID NO: 2343 - RNA, 20 nt, Artificial Sequence
  Description of Artificial Sequence: Synthetic oligonucleotide
ggaugacugggaauauguuu

SEQ ID NO: 2344 - RNA, 20 nt, Artificial Sequence
  Description of Artificial Sequence: Synthetic oligonucleotide
uagguccugaagaauaaaag

SEQ ID NO: 2345 - RNA, 20 nt, Artificial Sequence
  Description of Artificial Sequence: Synthetic oligonucleotide
agguccugaagaauaaaaga

SEQ ID NO: 2346 - RNA, 20 nt, Artificial Sequence
  Description of Artificial Sequence: Synthetic oligonucleotide
uccuaguacuucuaauauuu

SEQ ID NO: 2347 - RNA, 20 nt, Artificial Sequence
  Description of Artificial Sequence: Synthetic oligonucleotide
ggaaauagaaagcguguguu

SEQ ID NO: 2348 - RNA, 20 nt, Artificial Sequence
  Description of Artificial Sequence: Synthetic oligonucleotide
ggcaguccuaggcaaagaaa

SEQ ID NO: 2349 - RNA, 20 nt, Artificial Sequence
  Description of Artificial Sequence: Synthetic oligonucleotide
aaacuaaugcuucuuuuucu

SEQ ID NO: 2350 - RNA, 20 nt, Artificial Sequence
  Description of Artificial Sequence: Synthetic oligonucleotide
acaauacagaauucucuauc

SEQ ID NO: 2351 - RNA, 20 nt, Artificial Sequence
  Description of Artificial Sequence: Synthetic oligonucleotide
auaacagugauauugauaug

SEQ ID NO: 2352 - RNA, 20 nt, Artificial Sequence
  Description of Artificial Sequence: Synthetic oligonucleotide
gcaguguuccuaaaaaccua

SEQ ID NO: 2353 - RNA, 20 nt, Artificial Sequence
  Description of Artificial Sequence: Synthetic oligonucleotide
uaaaaaccuauggcccuaga

SEQ ID NO: 2354 - RNA, 20 nt, Artificial Sequence
  Description of Artificial Sequence: Synthetic oligonucleotide
uaaccaaguggaaccuucua

SEQ ID NO: 2355 - RNA, 20 nt, Artificial Sequence
  Description of Artificial Sequence: Synthetic oligonucleotide
auaaccaaguggaaccuucu

SEQ ID NO: 2356 - RNA, 20 nt, Artificial Sequence
  Description of Artificial Sequence: Synthetic oligonucleotide
caaaauuggaacaauguaaa

SEQ ID NO: 2357 - RNA, 20 nt, Artificial Sequence
  Description of Artificial Sequence: Synthetic oligonucleotide
uacacauacuggacaugguu

SEQ ID NO: 2358 - RNA, 20 nt, Artificial Sequence
  Description of Artificial Sequence: Synthetic oligonucleotide
agaaauacacauacuggaca

SEQ ID NO: 2359 - RNA, 20 nt, Artificial Sequence
  Description of Artificial Sequence: Synthetic oligonucleotide
uaucacagguaaccaaaagc

SEQ ID NO: 2360 - RNA, 20 nt, Artificial Sequence
  Description of Artificial Sequence: Synthetic oligonucleotide
aggagcuguggcuucuaaga

SEQ ID NO: 2361 - RNA, 20 nt, Artificial Sequence
  Description of Artificial Sequence: Synthetic oligonucleotide
uucuuagaagccacagcucc

SEQ ID NO: 2362 - RNA, 20 nt, Artificial Sequence
  Description of Artificial Sequence: Synthetic oligonucleotide
auauccuuuucaguguauuc

SEQ ID NO: 2363 - RNA, 20 nt, Artificial Sequence
  Description of Artificial Sequence: Synthetic oligonucleotide
guauccugaauacacugaaa

SEQ ID NO: 2364 - RNA, 20 nt, Artificial Sequence
  Description of Artificial Sequence: Synthetic oligonucleotide
uaccaguaaacagguauuuu

SEQ ID NO: 2365 - RNA, 20 nt, Artificial Sequence
  Description of Artificial Sequence: Synthetic oligonucleotide
cuuaaauacuucuaauguga

SEQ ID NO: 2366 - RNA, 20 nt, Artificial Sequence
  Description of Artificial Sequence: Synthetic oligonucleotide
acaaauaagugcauguuucu

SEQ ID NO: 2367 - RNA, 20 nt, Artificial Sequence
  Description of Artificial Sequence: Synthetic oligonucleotide
aggaaaguagaaacagaacu

SEQ ID NO: 2368 - RNA, 20 nt, Artificial Sequence
  Description of Artificial Sequence: Synthetic oligonucleotide
cauaauagcaaaacuaauug

SEQ ID NO: 2369 - RNA, 20 nt, Artificial Sequence
  Description of Artificial Sequence: Synthetic oligonucleotide
auaauagcaaaacuaauugu

SEQ ID NO: 2370 - RNA, 20 nt, Artificial Sequence
  Description of Artificial Sequence: Synthetic oligonucleotide
gguuccuuuuacaaauauua

SEQ ID NO: 2371 - RNA, 20 nt, Artificial Sequence
  Description of Artificial Sequence: Synthetic oligonucleotide
auuuguaaaaggaaccgaug

SEQ ID NO: 2372 - RNA, 20 nt, Artificial Sequence
  Description of Artificial Sequence: Synthetic oligonucleotide
aauugaagauuuggaagagg

SEQ ID NO: 2373 - RNA, 20 nt, Artificial Sequence
  Description of Artificial Sequence: Synthetic oligonucleotide
uggaagaggugggcagacuu

SEQ ID NO: 2374 - RNA, 20 nt, Artificial Sequence
  Description of Artificial Sequence: Synthetic oligonucleotide
aagauaaacugggacaguuc

SEQ ID NO: 2375 - RNA, 20 nt, Artificial Sequence
  Description of Artificial Sequence: Synthetic oligonucleotide
cuacccaacagaagauaaac

SEQ ID NO: 2376 - RNA, 20 nt, Artificial Sequence
  Description of Artificial Sequence: Synthetic oligonucleotide
cugccuuaaauuuacaauau

SEQ ID NO: 2377 - RNA, 20 nt, Artificial Sequence
  Description of Artificial Sequence: Synthetic oligonucleotide
uauccuauauuguaaauuua

SEQ ID NO: 2378 - RNA, 20 nt, Artificial Sequence
  Description of Artificial Sequence: Synthetic oligonucleotide
uuauuuauggaaugcaguaa

SEQ ID NO: 2379 - RNA, 20 nt, Artificial Sequence
  Description of Artificial Sequence: Synthetic oligonucleotide
uuauggaaugcaguaauggu

SEQ ID NO: 2380 - RNA, 20 nt, Artificial Sequence
  Description of Artificial Sequence: Synthetic oligonucleotide
ugcucauacagauuuuuuuc

SEQ ID NO: 2381 - RNA, 20 nt, Artificial Sequence
  Description of Artificial Sequence: Synthetic oligonucleotide
uagcuuauauuaauuacuuc

SEQ ID NO: 2382 - RNA, 20 nt, Artificial Sequence
  Description of Artificial Sequence: Synthetic oligonucleotide
auagaacuauguucuuaaua

SEQ ID NO: 2383 - RNA, 20 nt, Artificial Sequence
  Description of Artificial Sequence: Synthetic oligonucleotide
uaguucuauuaaguuauuaa

SEQ ID NO: 2384 - RNA, 20 nt, Artificial Sequence
  Description of Artificial Sequence: Synthetic oligonucleotide
uaaaagaggcacuaguacuu

SEQ ID NO: 2385 - RNA, 20 nt, Artificial Sequence
  Description of Artificial Sequence: Synthetic oligonucleotide
auuaauuuaucauucaaucc

SEQ ID NO: 2386 - RNA, 20 nt, Artificial Sequence
  Description of Artificial Sequence: Synthetic oligonucleotide
uaugauagugacuucuuaag

SEQ ID NO: 2387 - RNA, 20 nt, Artificial Sequence
  Description of Artificial Sequence: Synthetic oligonucleotide
ccuaagagaaagaggcaguu

SEQ ID NO: 2388 - RNA, 20 nt, Artificial Sequence
  Description of Artificial Sequence: Synthetic oligonucleotide
ccuaacugccucuuucucuu

SEQ ID NO: 2389 - RNA, 20 nt, Artificial Sequence
  Description of Artificial Sequence: Synthetic oligonucleotide
cauaacucuucuguggcagc

SEQ ID NO: 2390 - RNA, 20 nt, Artificial Sequence
  Description of Artificial Sequence: Synthetic oligonucleotide
uaaaucaaaugcuaaccucu

SEQ ID NO: 2391 - RNA, 20 nt, Artificial Sequence
  Description of Artificial Sequence: Synthetic oligonucleotide
acguaucaagaaaguguucu

SEQ ID NO: 2392 - RNA, 20 nt, Artificial Sequence
  Description of Artificial Sequence: Synthetic oligonucleotide
uucagcuuuaaugauauaau

SEQ ID NO: 2393 - RNA, 20 nt, Artificial Sequence
  Description of Artificial Sequence: Synthetic oligonucleotide
guacuuguuacaguccugug

SEQ ID NO: 2394 - RNA, 20 nt, Artificial Sequence
  Description of Artificial Sequence: Synthetic oligonucleotide
cacaguaucaagugcugaau

SEQ ID NO: 2395 - RNA, 20 nt, Artificial Sequence
  Description of Artificial Sequence: Synthetic oligonucleotide
gaaaagucauucuuauguug

SEQ ID NO: 2396 - RNA, 20 nt, Artificial Sequence
  Description of Artificial Sequence: Synthetic oligonucleotide
acaaauaauuuaaugcacau

SEQ ID NO: 2397 - RNA, 20 nt, Artificial Sequence
  Description of Artificial Sequence: Synthetic oligonucleotide
cagaagcaaguuugcucauu

SEQ ID NO: 2398 - RNA, 20 nt, Artificial Sequence
  Description of Artificial Sequence: Synthetic oligonucleotide
auacccuccucagcccaguc

SEQ ID NO: 2399 - RNA, 20 nt, Artificial Sequence
  Description of Artificial Sequence: Synthetic oligonucleotide
caagauaguauacaacuaaa

SEQ ID NO: 2400 - RNA, 20 nt, Artificial Sequence
  Description of Artificial Sequence: Synthetic oligonucleotide
auauuggcuuuaaguguugu

SEQ ID NO: 2401 - RNA, 20 nt, Artificial Sequence
  Description of Artificial Sequence: Synthetic oligonucleotide
uuuaaguguuguaggaguuc

SEQ ID NO: 2402 - RNA, 20 nt, Artificial Sequence
  Description of Artificial Sequence: Synthetic oligonucleotide
aauucccagcugcccucaaa

SEQ ID NO: 2403 - RNA, 20 nt, Artificial Sequence
  Description of Artificial Sequence: Synthetic oligonucleotide
gccuccuuuugagggcagcu

SEQ ID NO: 2404 - RNA, 20 nt, Artificial Sequence
  Description of Artificial Sequence: Synthetic oligonucleotide
uucaaugagacaaacaguaa

SEQ ID NO: 2405 - RNA, 20 nt, Artificial Sequence
  Description of Artificial Sequence: Synthetic oligonucleotide
auaaaauuuuguauggcugc

SEQ ID NO: 2406 - RNA, 20 nt, Artificial Sequence
  Description of Artificial Sequence: Synthetic oligonucleotide
uuauauuauguuuaugcagc

SEQ ID NO: 2407 - RNA, 20 nt, Artificial Sequence
  Description of Artificial Sequence: Synthetic oligonucleotide
auaaacauaauauaacccag

SEQ ID NO: 2408 - RNA, 20 nt, Artificial Sequence
  Description of Artificial Sequence: Synthetic oligonucleotide
auacuugaucuuuucccacu

SEQ ID NO: 2409 - RNA, 20 nt, Artificial Sequence
  Description of Artificial Sequence: Synthetic oligonucleotide
cauccuucaacuucaggguc

SEQ ID NO: 2410 - RNA, 20 nt, Artificial Sequence
  Description of Artificial Sequence: Synthetic oligonucleotide
cagccagacccugaaguuga

SEQ ID NO: 2411 - RNA, 20 nt, Artificial Sequence
  Description of Artificial Sequence: Synthetic oligonucleotide
agaacauaguguggacacaa

SEQ ID NO: 2412 - RNA, 20 nt, Artificial Sequence
  Description of Artificial Sequence: Synthetic oligonucleotide
ggacacaaagggaugaaauu

SEQ ID NO: 2413 - RNA, 20 nt, Artificial Sequence
  Description of Artificial Sequence: Synthetic oligonucleotide
aaauuguagugccagaaagg

SEQ ID NO: 2414 - RNA, 20 nt, Artificial Sequence
  Description of Artificial Sequence: Synthetic oligonucleotide
uagugccagaaagguggggu

SEQ ID NO: 2415 - RNA, 20 nt, Artificial Sequence
  Description of Artificial Sequence: Synthetic oligonucleotide
ggguuggugcuuugaaugcu

SEQ ID NO: 2416 - RNA, 20 nt, Artificial Sequence
  Description of Artificial Sequence: Synthetic oligonucleotide
aaaaauuaggaagucauuaa

SEQ ID NO: 2417 - RNA, 20 nt, Artificial Sequence
  Description of Artificial Sequence: Synthetic oligonucleotide
aucaaguuauuaacaguuaa

SEQ ID NO: 2418 - RNA, 20 nt, Artificial Sequence
  Description of Artificial Sequence: Synthetic oligonucleotide
uggagcaauaaccaccaaaa

SEQ ID NO: 2419 - RNA, 20 nt, Artificial Sequence
  Description of Artificial Sequence: Synthetic oligonucleotide
augcuaauuccaaaagccuu

SEQ ID NO: 2420 - RNA, 20 nt, Artificial Sequence
  Description of Artificial Sequence: Synthetic oligonucleotide
uuucaguuagcuauacauca

SEQ ID NO: 2421 - RNA, 20 nt, Artificial Sequence
  Description of Artificial Sequence: Synthetic oligonucleotide
guuggaauuaacuuuguagu

SEQ ID NO: 2422 - RNA, 20 nt, Artificial Sequence
  Description of Artificial Sequence: Synthetic oligonucleotide
uaaugucacugaccugguac

SEQ ID NO: 2423 - RNA, 20 nt, Artificial Sequence
  Description of Artificial Sequence: Synthetic oligonucleotide
ugacauuaagaauguaaagg

SEQ ID NO: 2424 - RNA, 20 nt, Artificial Sequence
  Description of Artificial Sequence: Synthetic oligonucleotide
caaucugcuaccaugcuguc

SEQ ID NO: 2425 - RNA, 20 nt, Artificial Sequence
  Description of Artificial Sequence: Synthetic oligonucleotide
cuaccaugcugucugguaga

SEQ ID NO: 2426 - RNA, 20 nt, Artificial Sequence
  Description of Artificial Sequence: Synthetic oligonucleotide
uuguagaucuccugcuuuua

SEQ ID NO: 2427 - RNA, 20 nt, Artificial Sequence
  Description of Artificial Sequence: Synthetic oligonucleotide
caaaguaucaccuuaaaagc

SEQ ID NO: 2428 - RNA, 20 nt, Artificial Sequence
  Description of Artificial Sequence: Synthetic oligonucleotide
aacaugggauguauguaaca

SEQ ID NO: 2429 - RNA, 20 nt, Artificial Sequence
  Description of Artificial Sequence: Synthetic oligonucleotide
gaucaccaacugguucuagc

SEQ ID NO: 2430 - RNA, 20 nt, Artificial Sequence
  Description of Artificial Sequence: Synthetic oligonucleotide
gcuuguuuuuugcugcucau

SEQ ID NO: 2431 - RNA, 20 nt, Artificial Sequence
  Description of Artificial Sequence: Synthetic oligonucleotide
gcucauugguuucauaagga

SEQ ID NO: 2432 - RNA, 20 nt, Artificial Sequence
  Description of Artificial Sequence: Synthetic oligonucleotide
gacucucaugccccccacug

SEQ ID NO: 2433 - RNA, 20 nt, Artificial Sequence
  Description of Artificial Sequence: Synthetic oligonucleotide
agaaauucauguuagagaga

SEQ ID NO: 2434 - RNA, 20 nt, Artificial Sequence
  Description of Artificial Sequence: Synthetic oligonucleotide
uaacaugaauuucuugaaug

SEQ ID NO: 2435 - RNA, 20 nt, Artificial Sequence
  Description of Artificial Sequence: Synthetic oligonucleotide
caugccuuguuauauuauaa

SEQ ID NO: 2436 - RNA, 20 nt, Artificial Sequence
  Description of Artificial Sequence: Synthetic oligonucleotide
uuagcccuuauaauauaaca

SEQ ID NO: 2437 - RNA, 20 nt, Artificial Sequence
  Description of Artificial Sequence: Synthetic oligonucleotide
guuggccagagcuaaauuuu

SEQ ID NO: 2438 - RNA, 20 nt, Artificial Sequence
  Description of Artificial Sequence: Synthetic oligonucleotide
uaauguuuuaauugacuuua

SEQ ID NO: 2439 - RNA, 20 nt, Artificial Sequence
  Description of Artificial Sequence: Synthetic oligonucleotide
gacuuucucuauuggagguu

SEQ ID NO: 2440 - RNA, 20 nt, Artificial Sequence
  Description of Artificial Sequence: Synthetic oligonucleotide
acuuucucuauuggagguua

SEQ ID NO: 2441 - RNA, 20 nt, Artificial Sequence
  Description of Artificial Sequence: Synthetic oligonucleotide
caaaaggauggcuuauuggu

SEQ ID NO: 2442 - RNA, 20 nt, Artificial Sequence
  Description of Artificial Sequence: Synthetic oligonucleotide
uucuacuucugcaguaagug

SEQ ID NO: 2443 - RNA, 20 nt, Artificial Sequence
  Description of Artificial Sequence: Synthetic oligonucleotide
aaccucauucuucaaacccu

SEQ ID NO: 2444 - RNA, 20 nt, Artificial Sequence
  Description of Artificial Sequence: Synthetic oligonucleotide
auuguagcuuagcuggaagu

SEQ ID NO: 2445 - RNA, 20 nt, Artificial Sequence
  Description of Artificial Sequence: Synthetic oligonucleotide
uggcuggaauuacacgugua

SEQ ID NO: 2446 - RNA, 20 nt, Artificial Sequence
  Description of Artificial Sequence: Synthetic oligonucleotide
uacggagauuuuagagggca

SEQ ID NO: 2447 - RNA, 20 nt, Artificial Sequence
  Description of Artificial Sequence: Synthetic oligonucleotide
ucagaugugucuuacaaaag

SEQ ID NO: 2448 - RNA, 20 nt, Artificial Sequence
  Description of Artificial Sequence: Synthetic oligonucleotide
uauuacuucuuuguggugac

SEQ ID NO: 2449 - RNA, 20 nt, Artificial Sequence
  Description of Artificial Sequence: Synthetic oligonucleotide
auuguuagcuuuuuuagcuu

SEQ ID NO: 2450 - RNA, 20 nt, Artificial Sequence
  Description of Artificial Sequence: Synthetic oligonucleotide
guagaggggaugauuacuaa

SEQ ID NO: 2451 - RNA, 20 nt, Artificial Sequence
  Description of Artificial Sequence: Synthetic oligonucleotide
uccauucaaguuuaaauaaa

SEQ ID NO: 2452 - RNA, 20 nt, Artificial Sequence
  Description of Artificial Sequence: Synthetic oligonucleotide
uaguucagagaaagaguuaa

SEQ ID NO: 2453 - RNA, 20 nt, Artificial Sequence
  Description of Artificial Sequence: Synthetic oligonucleotide
aacucuuucucugaacuaua

SEQ ID NO: 2454 - RNA, 20 nt, Artificial Sequence
  Description of Artificial Sequence: Synthetic oligonucleotide
aauuuaacuuccuacuuugu

SEQ ID NO: 2455 - RNA, 20 nt, Artificial Sequence
  Description of Artificial Sequence: Synthetic oligonucleotide
acucaagcaaccaguccuug

SEQ ID NO: 2456 - RNA, 20 nt, Artificial Sequence
  Description of Artificial Sequence: Synthetic oligonucleotide
gcaaaggaaaucugcuuucc

SEQ ID NO: 2457 - RNA, 20 nt, Artificial Sequence
  Description of Artificial Sequence: Synthetic oligonucleotide
uuugcauuucauccucuucc

SEQ ID NO: 2458 - RNA, 20 nt, Artificial Sequence
  Description of Artificial Sequence: Synthetic oligonucleotide
gguaaauuauuaaaacaagc

SEQ ID NO: 2459 - RNA, 20 nt, Artificial Sequence
  Description of Artificial Sequence: Synthetic oligonucleotide
cucaaucacacagcaaucag

SEQ ID NO: 2460 - RNA, 20 nt, Artificial Sequence
  Description of Artificial Sequence: Synthetic oligonucleotide
auaauguaaacuacucaucu

SEQ ID NO: 2461 - RNA, 20 nt, Artificial Sequence
  Description of Artificial Sequence: Synthetic oligonucleotide
aauaaugaagugguauagcu

SEQ ID NO: 2462 - RNA, 20 nt, Artificial Sequence
  Description of Artificial Sequence: Synthetic oligonucleotide
gaacugauguugauaggagu

SEQ ID NO: 2463 - RNA, 20 nt, Artificial Sequence
  Description of Artificial Sequence: Synthetic oligonucleotide
acugauguugauaggaguag

SEQ ID NO: 2464 - RNA, 20 nt, Artificial Sequence
  Description of Artificial Sequence: Synthetic oligonucleotide
ugggccgagagauugagggg

SEQ ID NO: 2465 - RNA, 20 nt, Artificial Sequence
  Description of Artificial Sequence: Synthetic oligonucleotide
auaguagauacucagguccc

SEQ ID NO: 2466 - RNA, 20 nt, Artificial Sequence
  Description of Artificial Sequence: Synthetic oligonucleotide
ccacauaacucauuuugcau

SEQ ID NO: 2467 - RNA, 20 nt, Artificial Sequence
  Description of Artificial Sequence: Synthetic oligonucleotide
ccucaaaugaaaaagaauca

SEQ ID NO: 2468 - RNA, 20 nt, Artificial Sequence
  Description of Artificial Sequence: Synthetic oligonucleotide
gccucaaaugaaaaagaauc

SEQ ID NO: 2469 - RNA, 20 nt, Artificial Sequence
  Description of Artificial Sequence: Synthetic oligonucleotide
cccugauucuuuuucauuug

SEQ ID NO: 2470 - RNA, 20 nt, Artificial Sequence
  Description of Artificial Sequence: Synthetic oligonucleotide
ugcagucuuuuuauaugcuu

SEQ ID NO: 2471 - RNA, 20 nt, Artificial Sequence
  Description of Artificial Sequence: Synthetic oligonucleotide
cuguugucacuaauccuuca

SEQ ID NO: 2472 - RNA, 20 nt, Artificial Sequence
  Description of Artificial Sequence: Synthetic oligonucleotide
agguaaauugucacgggagu

SEQ ID NO: 2473 - RNA, 20 nt, Artificial Sequence
  Description of Artificial Sequence: Synthetic oligonucleotide
ucuuacacuuguguauccuu

SEQ ID NO: 2474 - RNA, 20 nt, Artificial Sequence
  Description of Artificial Sequence: Synthetic oligonucleotide
aggucgugcuggcaguggug

SEQ ID NO: 2475 - RNA, 20 nt, Artificial Sequence
  Description of Artificial Sequence: Synthetic oligonucleotide
cacuauuaaaaaguuggugc

SEQ ID NO: 2476 - RNA, 20 nt, Artificial Sequence
  Description of Artificial Sequence: Synthetic oligonucleotide
uucuaucacuauuaaaaagu

SEQ ID NO: 2477 - RNA, 20 nt, Artificial Sequence
  Description of Artificial Sequence: Synthetic oligonucleotide
agcucauucagaacuacagu

SEQ ID NO: 2478 - RNA, 20 nt, Artificial Sequence
  Description of Artificial Sequence: Synthetic oligonucleotide
uuguccaccaaacuuaacac

SEQ ID NO: 2479 - RNA, 20 nt, Artificial Sequence
  Description of Artificial Sequence: Synthetic oligonucleotide
cacaguauaccccuacgaga

SEQ ID NO: 2480 - RNA, 20 nt, Artificial Sequence
  Description of Artificial Sequence: Synthetic oligonucleotide
uaggacaaagugaaacaacu

SEQ ID NO: 2481 - RNA, 20 nt, Artificial Sequence
  Description of Artificial Sequence: Synthetic oligonucleotide
aauugguugcugguaucucu

SEQ ID NO: 2482 - RNA, 20 nt, Artificial Sequence
  Description of Artificial Sequence: Synthetic oligonucleotide
aaacaagacuuuuaaguuau

SEQ ID NO: 2483 - RNA, 20 nt, Artificial Sequence
  Description of Artificial Sequence: Synthetic oligonucleotide
aacaagacuuuuaaguuauu

SEQ ID NO: 2484 - RNA, 20 nt, Artificial Sequence
  Description of Artificial Sequence: Synthetic oligonucleotide
aagcaauuauuguauaaaau

SEQ ID NO: 2485 - RNA, 20 nt, Artificial Sequence
  Description of Artificial Sequence: Synthetic oligonucleotide
aagacaaauaucuuacugaa

SEQ ID NO: 2486 - RNA, 20 nt, Artificial Sequence
  Description of Artificial Sequence: Synthetic oligonucleotide
cugagaauauuuuacucaua

SEQ ID NO: 2487 - RNA, 20 nt, Artificial Sequence
  Description of Artificial Sequence: Synthetic oligonucleotide
cuugaaagauaacagucuuu

SEQ ID NO: 2488 - RNA, 20 nt, Artificial Sequence
  Description of Artificial Sequence: Synthetic oligonucleotide
auaguaaucuuaggaagguu

SEQ ID NO: 2489 - RNA, 20 nt, Artificial Sequence
  Description of Artificial Sequence: Synthetic oligonucleotide
cuuaggaagguuuggaugac

SEQ ID NO: 2490 - RNA, 20 nt, Artificial Sequence
  Description of Artificial Sequence: Synthetic oligonucleotide
uguaaagagaaaagagugug

SEQ ID NO: 2491 - RNA, 20 nt, Artificial Sequence
  Description of Artificial Sequence: Synthetic oligonucleotide
acaaagccuuuuuuuguaau

SEQ ID NO: 2492 - RNA, 20 nt, Artificial Sequence
  Description of Artificial Sequence: Synthetic oligonucleotide
aucuguauuuaauguucuag

SEQ ID NO: 2493 - RNA, 20 nt, Artificial Sequence
  Description of Artificial Sequence: Synthetic oligonucleotide
uuuaauguucuaguggcucc

SEQ ID NO: 2494 - RNA, 20 nt, Artificial Sequence
  Description of Artificial Sequence: Synthetic oligonucleotide
agggaaaaguaguuuuguuc

SEQ ID NO: 2495 - RNA, 20 nt, Artificial Sequence
  Description of Artificial Sequence: Synthetic oligonucleotide
agagauuuuauuauaucuag

SEQ ID NO: 2496 - RNA, 20 nt, Artificial Sequence
  Description of Artificial Sequence: Synthetic oligonucleotide
aaucucuuaagugagaauau

SEQ ID NO: 2497 - RNA, 20 nt, Artificial Sequence
  Description of Artificial Sequence: Synthetic oligonucleotide
uaaaucauccuuuuauguag

SEQ ID NO: 2498 - RNA, 20 nt, Artificial Sequence
  Description of Artificial Sequence: Synthetic oligonucleotide
cauauuaaaacugcacaaaa

SEQ ID NO: 2499 - RNA, 20 nt, Artificial Sequence
  Description of Artificial Sequence: Synthetic oligonucleotide
acagauuuucccaaagguau

SEQ ID NO: 2500 - RNA, 20 nt, Artificial Sequence
  Description of Artificial Sequence: Synthetic oligonucleotide
aaagguaugggcaguaucac

SEQ ID NO: 2501 - RNA, 20 nt, Artificial Sequence
  Description of Artificial Sequence: Synthetic oligonucleotide
uaugggcaguaucacaggag

SEQ ID NO: 2502 - RNA, 20 nt, Artificial Sequence
  Description of Artificial Sequence: Synthetic oligonucleotide
acaggaguggguuuggauau

SEQ ID NO: 2503 - RNA, 20 nt, Artificial Sequence
  Description of Artificial Sequence: Synthetic oligonucleotide
gcucaaaaauauaacauuuc

SEQ ID NO: 2504 - RNA, 20 nt, Artificial Sequence
  Description of Artificial Sequence: Synthetic oligonucleotide
aacuuugugaauaaguuucu

SEQ ID NO: 2505 - RNA, 20 nt, Artificial Sequence
  Description of Artificial Sequence: Synthetic oligonucleotide
aaccuuaacuuuggagcccu

SEQ ID NO: 2506 - RNA, 20 nt, Artificial Sequence
  Description of Artificial Sequence: Synthetic oligonucleotide
ucaaucaucucuagaaccca

SEQ ID NO: 2507 - RNA, 20 nt, Artificial Sequence
  Description of Artificial Sequence: Synthetic oligonucleotide
guauuauaaccuuggaaagc

SEQ ID NO: 2508 - RNA, 20 nt, Artificial Sequence
  Description of Artificial Sequence: Synthetic oligonucleotide
uuguagcaaugaguauuuga

SEQ ID NO: 2509 - RNA, 20 nt, Artificial Sequence
  Description of Artificial Sequence: Synthetic oligonucleotide
uagggguguaaagcaaauug

SEQ ID NO: 2510 - RNA, 20 nt, Artificial Sequence
  Description of Artificial Sequence: Synthetic oligonucleotide
guucacagaauguuaauguu

SEQ ID NO: 2511 - RNA, 20 nt, Artificial Sequence
  Description of Artificial Sequence: Synthetic oligonucleotide
gauggauccuugucuguguu

SEQ ID NO: 2512 - RNA, 20 nt, Artificial Sequence
  Description of Artificial Sequence: Synthetic oligonucleotide
ugagcaaucugaauuuaagu

SEQ ID NO: 2513 - RNA, 20 nt, Artificial Sequence
  Description of Artificial Sequence: Synthetic oligonucleotide
gugagcaaucugaauuuaag

SEQ ID NO: 2514 - RNA, 20 nt, Artificial Sequence
  Description of Artificial Sequence: Synthetic oligonucleotide
aaccuuuuuccuaaucgcuu

SEQ ID NO: 2515 - RNA, 20 nt, Artificial Sequence
  Description of Artificial Sequence: Synthetic oligonucleotide
ggaaaaagguuuuuccuacu

SEQ ID NO: 2516 - RNA, 20 nt, Artificial Sequence
  Description of Artificial Sequence: Synthetic oligonucleotide
gaauauuaccuguauuaaau

SEQ ID NO: 2517 - RNA, 20 nt, Artificial Sequence
  Description of Artificial Sequence: Synthetic oligonucleotide
aaagcuaaacaaccaaacuc

SEQ ID NO: 2518 - RNA, 20 nt, Artificial Sequence
  Description of Artificial Sequence: Synthetic oligonucleotide
caaguuagguauuaaagaau

SEQ ID NO: 2519 - RNA, 20 nt, Artificial Sequence
  Description of Artificial Sequence: Synthetic oligonucleotide
ucaaguuagguauuaaagaa

SEQ ID NO: 2520 - RNA, 20 nt, Artificial Sequence
  Description of Artificial Sequence: Synthetic oligonucleotide
cuuauuagacucuucuucua

SEQ ID NO: 2521 - RNA, 20 nt, Artificial Sequence
  Description of Artificial Sequence: Synthetic oligonucleotide
cuaaaucucauugaagccac

SEQ ID NO: 2522 - RNA, 20 nt, Artificial Sequence
  Description of Artificial Sequence: Synthetic oligonucleotide
aacauaguuccuuagucaaa

SEQ ID NO: 2523 - RNA, 20 nt, Artificial Sequence
  Description of Artificial Sequence: Synthetic oligonucleotide
cucuuacuuagaauuuuucc

SEQ ID NO: 2524 - RNA, 20 nt, Artificial Sequence
  Description of Artificial Sequence: Synthetic oligonucleotide
cagggaauuuuucacauggc

SEQ ID NO: 2525 - RNA, 20 nt, Artificial Sequence
  Description of Artificial Sequence: Synthetic oligonucleotide
uaacagaagaguuacccaaa

SEQ ID NO: 2526 - RNA, 20 nt, Artificial Sequence
  Description of Artificial Sequence: Synthetic oligonucleotide
cuguagggauccaagggggg

SEQ ID NO: 2527 - RNA, 20 nt, Artificial Sequence
  Description of Artificial Sequence: Synthetic oligonucleotide
uaucuguagggauccaaggg

SEQ ID NO: 2528 - RNA, 20 nt, Artificial Sequence
  Description of Artificial Sequence: Synthetic oligonucleotide
uuuaucuguagggauccaag

SEQ ID NO: 2529 - RNA, 20 nt, Artificial Sequence
  Description of Artificial Sequence: Synthetic oligonucleotide
ggugcugcuggucaauuagc

SEQ ID NO: 2530 - RNA, 20 nt, Artificial Sequence
  Description of Artificial Sequence: Synthetic oligonucleotide
auagcaauccagggugcugc

SEQ ID NO: 2531 - RNA, 20 nt, Artificial Sequence
  Description of Artificial Sequence: Synthetic oligonucleotide
caaagggaugauagcaaucc

SEQ ID NO: 2532 - RNA, 20 nt, Artificial Sequence
  Description of Artificial Sequence: Synthetic oligonucleotide
gaacaguucacauaaaauuu

SEQ ID NO: 2533 - RNA, 20 nt, Artificial Sequence
  Description of Artificial Sequence: Synthetic oligonucleotide
augcuggcccuacauuugaa

SEQ ID NO: 2534 - RNA, 20 nt, Artificial Sequence
  Description of Artificial Sequence: Synthetic oligonucleotide
ugauuacugcuccauuaagu

SEQ ID NO: 2535 - RNA, 20 nt, Artificial Sequence
  Description of Artificial Sequence: Synthetic oligonucleotide
uuggucaauuauuacaauaa

SEQ ID NO: 2536 - RNA, 20 nt, Artificial Sequence
  Description of Artificial Sequence: Synthetic oligonucleotide
auaacuugaaaguacuaaau

SEQ ID NO: 2537 - RNA, 20 nt, Artificial Sequence
  Description of Artificial Sequence: Synthetic oligonucleotide
ugguaaagcauuauuugaaa

SEQ ID NO: 2538 - RNA, 20 nt, Artificial Sequence
  Description of Artificial Sequence: Synthetic oligonucleotide
gaaugcaugcuucagggaau

SEQ ID NO: 2539 - RNA, 20 nt, Artificial Sequence
  Description of Artificial Sequence: Synthetic oligonucleotide
cuuuuucuaacugauuuaga

SEQ ID NO: 2540 - RNA, 20 nt, Artificial Sequence
  Description of Artificial Sequence: Synthetic oligonucleotide
acacacauauuuuucuagag

SEQ ID NO: 2541 - RNA, 20 nt, Artificial Sequence
  Description of Artificial Sequence: Synthetic oligonucleotide
uuucuuuugcuuacaaucua

SEQ ID NO: 2542 - RNA, 20 nt, Artificial Sequence
  Description of Artificial Sequence: Synthetic oligonucleotide
aagaaaucaaggucaagauc

SEQ ID NO: 2543 - RNA, 20 nt, Artificial Sequence
  Description of Artificial Sequence: Synthetic oligonucleotide
auuaccucauggugcugacg

SEQ ID NO: 2544 - RNA, 20 nt, Artificial Sequence
  Description of Artificial Sequence: Synthetic oligonucleotide
agguuuacauucuccgaugc

SEQ ID NO: 2545 - RNA, 20 nt, Artificial Sequence
  Description of Artificial Sequence: Synthetic oligonucleotide
auauaggcauauaccugcau

SEQ ID NO: 2546 - RNA, 20 nt, Artificial Sequence
  Description of Artificial Sequence: Synthetic oligonucleotide
cugaucagauuuggcaauau

SEQ ID NO: 2547 - RNA, 20 nt, Artificial Sequence
  Description of Artificial Sequence: Synthetic oligonucleotide
uaauagauuuacauuacuau

SEQ ID NO: 2548 - RNA, 20 nt, Artificial Sequence
  Description of Artificial Sequence: Synthetic oligonucleotide
ugugauuuauuaaaguagcu

SEQ ID NO: 2549 - RNA, 20 nt, Artificial Sequence
  Description of Artificial Sequence: Synthetic oligonucleotide
ggaagaaggcgugacuauga

SEQ ID NO: 2550 - RNA, 20 nt, Artificial Sequence
  Description of Artificial Sequence: Synthetic oligonucleotide
cggaagaaggcgugacuaug

SEQ ID NO: 2551 - RNA, 20 nt, Artificial Sequence
  Description of Artificial Sequence: Synthetic oligonucleotide
gugagugugaguacggaaga

SEQ ID NO: 2552 - RNA, 20 nt, Artificial Sequence
  Description of Artificial Sequence: Synthetic oligonucleotide
auuuaaggaaugcuaaacug

SEQ ID NO: 2553 - RNA, 20 nt, Artificial Sequence
  Description of Artificial Sequence: Synthetic oligonucleotide
uccaguaaucuuuguauagg

SEQ ID NO: 2554 - RNA, 20 nt, Artificial Sequence
  Description of Artificial Sequence: Synthetic oligonucleotide
cagucuuccugaacagacaa

SEQ ID NO: 2555 - RNA, 20 nt, Artificial Sequence
  Description of Artificial Sequence: Synthetic oligonucleotide
ccuugucuguucaggaagac

SEQ ID NO: 2556 - RNA, 20 nt, Artificial Sequence
  Description of Artificial Sequence: Synthetic oligonucleotide
accaugccagcuccaguccg

SEQ ID NO: 2557 - RNA, 20 nt, Artificial Sequence
  Description of Artificial Sequence: Synthetic oligonucleotide
acggacuggagcuggcaugg

SEQ ID NO: 2558 - RNA, 20 nt, Artificial Sequence
  Description of Artificial Sequence: Synthetic oligonucleotide
cugguucuaugaagcugcuu

SEQ ID NO: 2559 - RNA, 20 nt, Artificial Sequence
  Description of Artificial Sequence: Synthetic oligonucleotide
aauuuacauccaauucaaac

SEQ ID NO: 2560 - RNA, 20 nt, Artificial Sequence
  Description of Artificial Sequence: Synthetic oligonucleotide
uuuaaauagccaguuugaau

SEQ ID NO: 2561 - RNA, 20 nt, Artificial Sequence
  Description of Artificial Sequence: Synthetic oligonucleotide
uacuaaagcaggaaaauggg

SEQ ID NO: 2562 - RNA, 20 nt, Artificial Sequence
  Description of Artificial Sequence: Synthetic oligonucleotide
guagucuauauauuuuauau

SEQ ID NO: 2563 - RNA, 20 nt, Artificial Sequence
  Description of Artificial Sequence: Synthetic oligonucleotide
caugugcaacaguuuauuaa

SEQ ID NO: 2564 - RNA, 20 nt, Artificial Sequence
  Description of Artificial Sequence: Synthetic oligonucleotide
auacuuauagacagacuuau

SEQ ID NO: 2565 - RNA, 20 nt, Artificial Sequence
  Description of Artificial Sequence: Synthetic oligonucleotide
uugcaguguuaccagaauca

SEQ ID NO: 2566 - RNA, 20 nt, Artificial Sequence
  Description of Artificial Sequence: Synthetic oligonucleotide
uuuuucuaugcaagucuugu

SEQ ID NO: 2567 - RNA, 20 nt, Artificial Sequence
  Description of Artificial Sequence: Synthetic oligonucleotide
aagaaauauguacauaguuc

SEQ ID NO: 2568 - RNA, 20 nt, Artificial Sequence
  Description of Artificial Sequence: Synthetic oligonucleotide
ucuggaaauuauuuguggua

SEQ ID NO: 2569 - RNA, 20 nt, Artificial Sequence
  Description of Artificial Sequence: Synthetic oligonucleotide
aaaauauggugcaggugucu

SEQ ID NO: 2570 - RNA, 20 nt, Artificial Sequence
  Description of Artificial Sequence: Synthetic oligonucleotide
ccauuuuauuucauguagua

SEQ ID NO: 2571 - RNA, 20 nt, Artificial Sequence
  Description of Artificial Sequence: Synthetic oligonucleotide
aaagaaucaaugcauauccu

SEQ ID NO: 2572 - RNA, 20 nt, Artificial Sequence
  Description of Artificial Sequence: Synthetic oligonucleotide
ccauaggaaagcaauuucac

SEQ ID NO: 2573 - RNA, 20 nt, Artificial Sequence
  Description of Artificial Sequence: Synthetic oligonucleotide
ccagugaaauugcuuuccua

SEQ ID NO: 2574 - RNA, 20 nt, Artificial Sequence
  Description of Artificial Sequence: Synthetic oligonucleotide
auuuagagauuuuucuggua

SEQ ID NO: 2575 - RNA, 20 nt, Artificial Sequence
  Description of Artificial Sequence: Synthetic oligonucleotide
cucugcaagacccaagcacu

SEQ ID NO: 2576 - RNA, 20 nt, Artificial Sequence
  Description of Artificial Sequence: Synthetic oligonucleotide
gaaauugaacugaaccguaa

SEQ ID NO: 2577 - RNA, 20 nt, Artificial Sequence
  Description of Artificial Sequence: Synthetic oligonucleotide
aagcacagacaugagaauug

SEQ ID NO: 2578 - RNA, 20 nt, Artificial Sequence
  Description of Artificial Sequence: Synthetic oligonucleotide
gguuuuuggagccucuuuga

SEQ ID NO: 2579 - RNA, 20 nt, Artificial Sequence
  Description of Artificial Sequence: Synthetic oligonucleotide
aagacaaauacugaaauccc

SEQ ID NO: 2580 - RNA, 20 nt, Artificial Sequence
  Description of Artificial Sequence: Synthetic oligonucleotide
gucaauauaaaauaacuccu

SEQ ID NO: 2581 - RNA, 20 nt, Artificial Sequence
  Description of Artificial Sequence: Synthetic oligonucleotide
gagucacccaaaaggaugaa

SEQ ID NO: 2582 - RNA, 20 nt, Artificial Sequence
  Description of Artificial Sequence: Synthetic oligonucleotide
auuaaagaaaacauagggga

SEQ ID NO: 2583 - RNA, 20 nt, Artificial Sequence
  Description of Artificial Sequence: Synthetic oligonucleotide
auauuccuaguucuaguccu

SEQ ID NO: 2584 - RNA, 20 nt, Artificial Sequence
  Description of Artificial Sequence: Synthetic oligonucleotide
auucugaaucucuauuugcc

SEQ ID NO: 2585 - RNA, 20 nt, Artificial Sequence
  Description of Artificial Sequence: Synthetic oligonucleotide
guaaaaaacuguuaggaugg

SEQ ID NO: 2586 - RNA, 20 nt, Artificial Sequence
  Description of Artificial Sequence: Synthetic oligonucleotide
uuaggauaaauauuuccuua

SEQ ID NO: 2587 - RNA, 20 nt, Artificial Sequence
  Description of Artificial Sequence: Synthetic oligonucleotide
uucaguuuaagugucacuuc

SEQ ID NO: 2588 - RNA, 20 nt, Artificial Sequence
  Description of Artificial Sequence: Synthetic oligonucleotide
uauaaauauacacuguagua

SEQ ID NO: 2589 - RNA, 20 nt, Artificial Sequence
  Description of Artificial Sequence: Synthetic oligonucleotide
augaguggaguuaaauuauu

SEQ ID NO: 2590 - RNA, 20 nt, Artificial Sequence
  Description of Artificial Sequence: Synthetic oligonucleotide
cauggacuaguaggcauuuu

SEQ ID NO: 2591 - RNA, 20 nt, Artificial Sequence
  Description of Artificial Sequence: Synthetic oligonucleotide
ucauggacuaguaggcauuu

SEQ ID NO: 2592 - RNA, 20 nt, Artificial Sequence
  Description of Artificial Sequence: Synthetic oligonucleotide
ggccaacuucauggacuagu

SEQ ID NO: 2593 - RNA, 20 nt, Artificial Sequence
  Description of Artificial Sequence: Synthetic oligonucleotide
ugccuacuaguccaugaagu

SEQ ID NO: 2594 - RNA, 20 nt, Artificial Sequence
  Description of Artificial Sequence: Synthetic oligonucleotide
auaagcacaucagugauaac

SEQ ID NO: 2595 - RNA, 20 nt, Artificial Sequence
  Description of Artificial Sequence: Synthetic oligonucleotide
guccaagacaaaaguacagu

SEQ ID NO: 2596 - RNA, 20 nt, Artificial Sequence
  Description of Artificial Sequence: Synthetic oligonucleotide
uaccacuugguggcacuaug

SEQ ID NO: 2597 - RNA, 20 nt, Artificial Sequence
  Description of Artificial Sequence: Synthetic oligonucleotide
caauaguaauuuuguuaagg

SEQ ID NO: 2598 - RNA, 20 nt, Artificial Sequence
  Description of Artificial Sequence: Synthetic oligonucleotide
gcucaauaguaauuuuguua

SEQ ID NO: 2599 - RNA, 20 nt, Artificial Sequence
  Description of Artificial Sequence: Synthetic oligonucleotide
acauuuaacagacauggaga

SEQ ID NO: 2600 - RNA, 20 nt, Artificial Sequence
  Description of Artificial Sequence: Synthetic oligonucleotide
gacaaaucaacagccacaga

SEQ ID NO: 2601 - RNA, 20 nt, Artificial Sequence
  Description of Artificial Sequence: Synthetic oligonucleotide
uuaggcuuucugaugaaggc

SEQ ID NO: 2602 - RNA, 20 nt, Artificial Sequence
  Description of Artificial Sequence: Synthetic oligonucleotide
uggcucuuauugacuuaauu

SEQ ID NO: 2603 - RNA, 20 nt, Artificial Sequence
  Description of Artificial Sequence: Synthetic oligonucleotide
uaccaaccccuaagagaaag

SEQ ID NO: 2604 - RNA, 20 nt, Artificial Sequence
  Description of Artificial Sequence: Synthetic oligonucleotide
acguuaauauauugcacuag

SEQ ID NO: 2605 - RNA, 20 nt, Artificial Sequence
  Description of Artificial Sequence: Synthetic oligonucleotide
uagucuaagccuccuuuuga

SEQ ID NO: 2606 - RNA, 20 nt, Artificial Sequence
  Description of Artificial Sequence: Synthetic oligonucleotide
agguuaauucuuguuaucca

SEQ ID NO: 2607 - RNA, 20 nt, Artificial Sequence
  Description of Artificial Sequence: Synthetic oligonucleotide
uccccucuacuuugaaauag

SEQ ID NO: 2608 - RNA, 20 nt, Artificial Sequence
  Description of Artificial Sequence: Synthetic oligonucleotide
cuacccuccacccuuaaggu

SEQ ID NO: 2609 - RNA, 20 nt, Artificial Sequence
  Description of Artificial Sequence: Synthetic oligonucleotide
uauacugugccucuuacuuu

SEQ ID NO: 2610 - RNA, 20 nt, Artificial Sequence
  Description of Artificial Sequence: Synthetic oligonucleotide
aaacaacucuguuaaagcuu

SEQ ID NO: 2611 - RNA, 20 nt, Artificial Sequence
  Description of Artificial Sequence: Synthetic oligonucleotide
ggcagaauagagcaggcauu

SEQ ID NO: 2612 - RNA, 20 nt, Artificial Sequence
  Description of Artificial Sequence: Synthetic oligonucleotide
auuuaucuguagggauccaa

SEQ ID NO: 2613 - RNA, 20 nt, Artificial Sequence
  Description of Artificial Sequence: Synthetic oligonucleotide
aauaaacagagccuugauuc

SEQ ID NO: 2614 - DNA, 5541 bp, Homo sapiens
gcgtgctcccaacgtcgccccggtttgacgcacacggcaccaaactgtttgatttaattttggatgagatcgttcttgcagcaagatgttaataagacaaaatctagactaaatgtgttaaatgggcttgccaacaatatggatgatttgaagataaacaccgatattactggtgctaaagaagaactcctagatgacaacaattttatctcagacaaagagagcggagttcataagccaaaagattgtcaaacatcatttcagaaaaataatacgttgactctgcctgaagaactgtcaaaggacaaatctgaaaacgccttaagtggaggccagtctagtctatttatacatgctggtgctcctactgtttctagtgaaaactttatcttgcctaaaggagctgctgttaatggaccagtttcacactcctccttaactaagacttccaatatgaataaaggcagtgtttcattaaccactggacagcctgtggatcagccaacaacagaatcttgttcaactttgaaggtagcagctgatcttcagctgtctacaccacagaaagcaagtcaacaccaagttttatttttgttatcagatgtagcacatgctaagaatcccacccattccaataaaaaactacctacctctgcttcagttggttgtgacattcagaattcagtagggagtaatataaagtcagatggcactttaataaatcaagtagaggtgggtgaggatggtgaagatttattggtgaaagatgattgtgtcaatacagtaacgggaatttcctcaggtacagatggatttaggtcagaaaatgatacaaactgggatccccaaaaagagttcattcaatttcttatgactaatgaggaaacagtagataaagctccacctcattctaaaataggtctagaaaaaaaaagaaagcgaaaaatggatgtaagcaagataactcgttataccgaggattgctttagtgattctaattgtgtacccaataaatcaaaaatgcaagaagtagactttctagaacaaaatgaagagctacaagcagtagactcacagaaatatgcattatcaaaagtgaagcctgaatcaactgatgaagacttagaatctgtggatgccttccaacatctaatttataacccagataagtgtggagaagagagttcacctgttcatactagcacttttctttcaaataccttaaaaaagaaatgtgaagagagtgattctgagtcacctgctactttcagtaccgaagagccatcattctacccctgtacaaagtgcaatgtgaattttagggagaagaagcacctccacaggcatatgatgtatcatttagatgggaatagtcactttcgccatcttaatgtcccaaggccatatgcttgtagagaatgtggacggacatttcgagatcgcaattcacttctaaaacatatgattattcaccaggagagaagacagaagttgatggaggaaattcgtgaattgaaagaacttcaggatgaaggaagaagtgcacgattacagtgtcctcagtgtgtgtttggtaccaattgccctaaaacatttgtgcaacatgctaaaacccatgaaaaagataaaaggtactactgctgtgaagagtgtaacttcatggcagtgacagaaaatgaattggaatgccatcgaggcattgcacatggggcagtggtaaaatgccctatggtcacttctgatattgcccagagaaaaacacaaaaaaagactttcatgaaagactctgtagtaggatcatccaaaaaatcagctacctacatatgtaagatgtgtccttttactacttcagccaaaagtgttttaaaaaagcacacggagtacttgcattcatcatcatgtgttgattcatttggtagtcctcttggacttgataaaagaaaaaatgacatccttgaagaacctgtagatagtgatagcactaaaacattaactaaacaacagtcaaccacatttccaaagaactctgctttaaaacaagatgtgaagcgaacatttggatcaacctcacaatcaagtagtttttcaaaaattcataagcggccacacagaatacagaaagctcggaaaagcattgcccaatcaggtgtaaacatgtgcaatcaaaacagctctcctcataagaatgttacaattaaaagcagcgttgaccaaaaacctaagtatttccatcaagcagcaaaagaaaagtctaatgccaaggcaaatagccactatttgtatagacacaaatatgaaaactataggatgatcaaaaaatcaggtgaatcatatcctgtgcatttcaaaaaagaagaagctagttcattaaattctttacacctgttttcatcatcaagtaattctcacaacaattttatttcagaccctcataagcctgacgccaaaaggcctgaaagcttcaaagatcacagacgtgtagctgtaaagagagtaattaaggaatctaagaaggaaagttctgttggaggggaagacttggatagctatccagattttttgcataaaatgactgttgtcgttttgcaaaaacttaattctgctgaaaagaaagatagttatgaaacagaagatgaaagttcctgggataatgttgagttaggagactacactacacaggccatagaagatgaaacctatagtgatattaatcaagagcatgtaaatttattccctttatttaagagcaaagtggaaggtcaggagcctggagaaaatgctactcttagttatgaccaaaacgatggcttttattttgaatactatgaagatactggaagtaacaactttttgcatgagatacatgatcctcagcatttagaaactgcagatgcttcattgtcaaagcatagttctgtttttcattggactgatttgtctcttgagaagaaatcgtgtccttactgcccagcaacatttgaaacaggtgttgggttatcaaatcatgtcagggggcatcttcacagagcaggattaagctatgaagcccgtcatgttgtatcaccagaacaaatagccacaagtgacaaaatgcagcatttcaaaagaactggcacaggaacacctgttaaacgagttagaaaagctatagagaagtctgaaaccacttctgaacacacttgtcagctctgtggtggttggtttgatactaaaattggattatcaaatcatgttagaggccacttgaaaagacttggaaagacgaaatgggatgctcacaaatctccaatctgtgttctgaatgagatgatgcaaaatgaagaaaaatatgaaaaaatcttaaaggcattgaacagtcgtcgtattattcccagaccatttgtagctcaaaaacttgcatcaagtgatgactttatatctcaaaatgttatacctcttgaagcataccgtaatggcctaaagactgaagctctgtcagtgtctgcatcagaagaagaagggctgaatttcttaaatgaatatgatgaaacaaaaccagaactgcccagtgggaaaaagaatcagtctcttacactcatagaacttcttaaaaataaaaggatgggagaagaaaggaattctgctatttctcctcaaaagatccataatcagacagcaagaaagagattcgttcagaaatgcgttcttccattaaatgaggatagtccgttgatgtatcagccacaaaaaatggacttgactatgcactcagccttagattgtaagcaaaagaaatcaaggtcaagatctggaagcaagaagaaaatgctaacattacctcatggtgctgacgaggtttacattctccgatgcaggttttgtggcctagtctttcgaggacccttgtctgttcaggaagactggattaagcacttacaacgacatattgtaaacgctaatcttccacggactggagctggcatggtggaagtcacgtcactacttaaaaagcctgcctccattacagaaacttcattttctctactaatggccgaagcagcttcatagaaccaggaaaccttttaaatagccagtttgaattggatgtaaatttgaaattctttttttttaagccacattaaattatctgtttataaatactaaagcaggaaaatggggggaaagtgaattacagtgacatcagagcaaattgaatacttaaaacagtaagtagtctatatattttatatagggtggaagatgtgtttttaaggtttatgaagttttgttggttaactgtgttcactcagtaaaagagcagtacatgtaagcagccattaataaactgttgcacatggatacttatagacagacttattggacaattatgttttttgcagtgttaccagaatcaaggctctgtttattccccacaagacttgcatagaaaaataagatattatattttgtttgtatgtatttagtgttttgtataataccaagaaccgctgactaaatttactcaaattagggcattaaatatcatgtacttcatagtttgagactgttcactcaaatagggcagagtactattctatctagatgtgtaagtgttttttttaaaatcacatggaacggttttttttatactaaaaagtggagggagatttgtttaaacaagtatttctaaaagaaatatgtacatagttctggaaattatttgtggtaaggaaatattctttactccagttgcatttctcagacaataaagtggtgcatccatgctacctcctactttgtcaacaaagatgctatttaccctttacatttttgtatcataatagattttaaaaatctaatgttctttattgcaagacattcttttgttaacaggtttgtttctttttaatgttttacctaaaatttgacatgcttacaggacaggtttgcctcttactttatttaacattgtagaaatgtaattaataaacaatgctcactacacagtttagaatagacgttctcatttatattatcttccaaatttgatcagttagcaaaacttaatacaccaattaaaatatttctacatatgagaatgtttacaatttaaattttagaacttgttttggatgtgattatatgtacgaaaatcgtgtaacactatgctcatgctaagaaccgacataacagaattactgaaataaatgtgctgtgaggaatggaaaatatggtgcaggtgtcttggtcatgataaattgtgattctttttaaaaattttttccaaaaacaattaggtattttaatctgaaatcagattcctttacaaacaacaagtttttgtatgcaagcaccattttatttcatgtagtatggctaatactatagttgaaccaaggatatgcattgattctttgcttcgtatgtaaataaagttaaaaacagttaaaataaggagtattttggtagagtatatacatacctcactgccagtgaaattgctttcctatggtatatctccttaccagaaaaatctctaaataaaaaaaggtttaaagaaaa

SEQ ID NO: 2615 - DNA, 1897 bp, Homo sapiens
gcgtgctcccaacgtcgccccggtttgacgcacacggcaccaaactgtttgatttaattttggatgagatcgttcttgcagcaagatgttaataagacaaaatctagccttagattgtaagcaaaagaaatcaaggtcaagatctggaagcaagaagaaaatgctaacattacctcatggtgctgacgaggtttacattctccgatgcaggttttgtggcctagtctttcgaggacccttgtctgttcaggaagactggattaagcacttacaacgacatattgtaaacgctaatcttccacggactggagctggcatggtggaagtcacgtcactacttaaaaagcctgcctccattacagaaacttcattttctctactaatggccgaagcagcttcatagaaccaggaaaccttttaaatagccagtttgaattggatgtaaatttgaaattctttttttttaagccacattaaattatctgtttataaatactaaagcaggaaaatggggggaaagtgaattacagtgacatcagagcaaattgaatacttaaaacagtaagtagtctatatattttatatagggtggaagatgtgtttttaaggtttatgaagttttgttggttaactgtgttcactcagtaaaagagcagtacatgtaagcagccattaataaactgttgcacatggatacttatagacagacttattggacaattatgttttttgcagtgttaccagaatcaaggctctgtttattccccacaagacttgcatagaaaaataagatattatattttgtttgtatgtatttagtgttttgtataataccaagaaccgctgactaaatttactcaaattagggcattaaatatcatgtacttcatagtttgagactgttcactcaaatagggcagagtactattctatctagatgtgtaagtgttttttttaaaatcacatggaacggttttttttatactaaaaagtggagggagatttgtttaaacaagtatttctaaaagaaatatgtacatagttctggaaattatttgtggtaaggaaatattctttactccagttgcatttctcagacaataaagtggtgcatccatgctacctcctactttgtcaacaaagatgctatttaccctttacatttttgtatcataatagattttaaaaatctaatgttctttattgcaagacattcttttgttaacaggtttgtttctttttaatgttttacctaaaatttgacatgcttacaggacaggtttgcctcttactttatttaacattgtagaaatgtaattaataaacaatgctcactacacagtttagaatagacgttctcatttatattatcttccaaatttgatcagttagcaaaacttaatacaccaattaaaatatttctacatatgagaatgtttacaatttaaattttagaacttgttttggatgtgattatatgtacgaaaatcgtgtaacactatgctcatgctaagaaccgacataacagaattactgaaataaatgtgctgtgaggaatggaaaatatggtgcaggtgtcttggtcatgataaattgtgattctttttaaaaattttttccaaaaacaattaggtattttaatctgaaatcagattcctttacaaacaacaagtttttgtatgcaagcaccattttatttcatgtagtatggctaatactatagttgaaccaaggatatgcattgattctttgcttcgtatgtaaataaagttaaaaacagttaaaataaggagtattttggtagagtatatacatacctcactgccagtgaaattgctttcctatggtatatctccttaccagaaaaatctctaaataaaaaaaggtttaaagaaaa

SEQ ID NO: 2616 - DNA, 2062 bp, Homo sapiens
ggtcgccattgcaatgcactgagtaacggggcgggccgagagcagtcaccaacccctctcgttgaggctgctcggttgtggccagaaacgctggctctggcattaactgtctacacccctccccttacttgggacaggaccgcatagccctcccctccccccgtcctgcaagatcttatgcggctaggtgcctgggaagtaacagcaagaggtttgatttaattttggatgagatcgttcttgcagcaagatgttaataagacaaaatctagccttagattgtaagcaaaagaaatcaaggtcaagatctggaagcaagaagaaaatgctaacattacctcatggtgctgacgaggtttacattctccgatgcaggttttgtggcctagtctttcgaggacccttgtctgttcaggaagactggattaagcacttacaacgacatattgtaaacgctaatcttccacggactggagctggcatggtggaagtcacgtcactacttaaaaagcctgcctccattacagaaacttcattttctctactaatggccgaagcagcttcatagaaccaggaaaccttttaaatagccagtttgaattggatgtaaatttgaaattctttttttttaagccacattaaattatctgtttataaatactaaagcaggaaaatggggggaaagtgaattacagtgacatcagagcaaattgaatacttaaaacagtaagtagtctatatattttatatagggtggaagatgtgtttttaaggtttatgaagttttgttggttaactgtgttcactcagtaaaagagcagtacatgtaagcagccattaataaactgttgcacatggatacttatagacagacttattggacaattatgttttttgcagtgttaccagaatcaaggctctgtttattccccacaagacttgcatagaaaaataagatattatattttgtttgtatgtatttagtgttttgtataataccaagaaccgctgactaaatttactcaaattagggcattaaatatcatgtacttcatagtttgagactgttcactcaaatagggcagagtactattctatctagatgtgtaagtgttttttttaaaatcacatggaacggttttttttatactaaaaagtggagggagatttgtttaaacaagtatttctaaaagaaatatgtacatagttctggaaattatttgtggtaaggaaatattctttactccagttgcatttctcagacaataaagtggtgcatccatgctacctcctactttgtcaacaaagatgctatttaccctttacatttttgtatcataatagattttaaaaatctaatgttctttattgcaagacattcttttgttaacaggtttgtttctttttaatgttttacctaaaatttgacatgcttacaggacaggtttgcctcttactttatttaacattgtagaaatgtaattaataaacaatgctcactacacagtttagaatagacgttctcatttatattatcttccaaatttgatcagttagcaaaacttaatacaccaattaaaatatttctacatatgagaatgtttacaatttaaattttagaacttgttttggatgtgattatatgtacgaaaatcgtgtaacactatgctcatgctaagaaccgacataacagaattactgaaataaatgtgctgtgaggaatggaaaatatggtgcaggtgtcttggtcatgataaattgtgattctttttaaaaattttttccaaaaacaattaggtattttaatctgaaatcagattcctttacaaacaacaagtttttgtatgcaagcaccattttatttcatgtagtatggctaatactatagttgaaccaaggatatgcattgattctttgcttcgtatgtaaataaagttaaaaacagttaaaataaggagtattttggtagagtatatacatacctcactgccagtgaaattgctttcctatggtatatctccttaccagaaaaatctctaaataaaaaaaggtttaaagaaaa

SEQ ID NO: 2617 - DNA, 5541 bp, Homo sapiens; identical to SEQ ID NO: 2614

SEQ ID NO: 2618 - DNA, 2036 bp, Homo sapiens
cggggcgggccgagagcagtcaccaacccctctcgttgaggctgctcggttgtggccagaaacgctggctctggcattaactgtctacacccctccccttacttgggacaggaccgcatagccctcccctccccccgtcctgcaagatcttatgcggctaggtgcctgggaagtaacagcaagaggtttgatttaattttggatgagatcgttcttgcagcaagatgttaataagacaaaatctagccttagattgtaagcaaaagaaatcaaggtcaagatctggaagcaagaagaaaatgctaacattacctcatggtgctgacgaggtttacattctccgatgcaggttttgtggcctagtctttcgaggacccttgtctgttcaggaagactggattaagcacttacaacgacatattgtaaacgctaatcttccacggactggagctggcatggtggaagtcacgtcactacttaaaaagcctgcctccattacagaaacttcattttctctactaatggccgaagcagcttcatagaaccaggaaaccttttaaatagccagtttgaattggatgtaaatttgaaattctttttttttaagccacattaaattatctgtttataaatactaaagcaggaaaatggggggaaagtgaattacagtgacatcagagcaaattgaatacttaaaacagtaagtagtctatatattttatatagggtggaagatgtgtttttaaggtttatgaagttttgttggttaactgtgttcactcagtaaaagagcagtacatgtaagcagccattaataaactgttgcacatggatacttatagacagacttattggacaattatgttttttgcagtgttaccagaatcaaggctctgtttattccccacaagacttgcatagaaaaataagatattatattttgtttgtatgtatttagtgttttgtataataccaagaaccgctgactaaatttactcaaattagggcattaaatatcatgtacttcatagtttgagactgttcactcaaatagggcagagtactattctatctagatgtgtaagtgttttttttaaaatcacatggaacggttttttttatactaaaaagtggagggagatttgtttaaacaagtatttctaaaagaaatatgtacatagttctggaaattatttgtggtaaggaaatattctttactccagttgcatttctcagacaataaagtggtgcatccatgctacctcctactttgtcaacaaagatgctatttaccctttacatttttgtatcataatagattttaaaaatctaatgttctttattgcaagacattcttttgttaacaggtttgtttctttttaatgttttacctaaaatttgacatgcttacaggacaggtttgcctcttactttatttaacattgtagaaatgtaattaataaacaatgctcactacacagtttagaatagacgttctcatttatattatcttccaaatttgatcagttagcaaaacttaatacaccaattaaaatatttctacatatgagaatgtttacaatttaaattttagaacttgttttggatgtgattatatgtacgaaaatcgtgtaacactatgctcatgctaagaaccgacataacagaattactgaaataaatgtgctgtgaggaatggaaaatatggtgcaggtgtcttggtcatgataaattgtgattctttttaaaaattttttccaaaaacaattaggtattttaatctgaaatcagattcctttacaaacaacaagtttttgtatgcaagcaccattttatttcatgtagtatggctaatactatagttgaaccaaggatatgcattgattctttgcttcgtatgtaaataaagttaaaaacagttaaaataaggagtattttggtagagtatatacatacctcactgccagtgaaattgctttcctatggtatatctccttaccagaaaaatctctaaataaaaaaaggtttaaagaaaa

SEQ ID NO: 2619 - DNA, 1253 bp, Homo sapiens
gagaacagtggtgcactgtttccgctgccctcgtttgtctaattggcccagacgctccaccagcgcgaagcttcccgggagctcctcgctggccacccccgcggcccgcagcccggcagaggcgggaaagcagcgcgcctgcgccgtgggaaccggggctggaggcgaaaagcggggagcggaggggggccgctggagccgagtagcgtacagagcggcgtgtgacgcggggacgccgcgtgctcccaacgtcgccccggtttgacgcacacggcaccaaactgtttgatttaattttggatgagatcgttcttgcagcaagatgttaataagacaaaatctagccttagattgtaagcaaaagaaatcaaggtcaagatctggaagcaagaagaaaatgctaacattacctcatggtgctgacgaggtttacattctccgatgcaggttttgtggcctagtctttcgaggacccttgtctgttcaggaagactggattaagcacttacaacgacatattgtaaacgctaatcttccacggactggagctggcatggtggaagtcacgtcactacttaaaaagcctgcctccattacagaaacttcattttctctactaatggccgaagcagcttcatagaaccaggaaaccttttaaatagccagtttgaattggatgtaaatttgaaattctttttttttaagccacattaaattatctgtttataaatactaaagcaggaaaatggggggaaagtgaattacagtgacatcagagcaaattgaatacttaaaacagtaagtagtctatatattttatatagggtggaagatgtgtttttaaggtttatgaagttttgttggttaactgtgttcactcagtaaaagagcagtacatgtaagcagccattaataaactgttgcacatggatacttatagacagacttattggacaattatgttttttgcagtgttaccagaatcaaggctctgtttattccccacaagacttgcatagaaaaataagatattatattttgtttgtatgtatttagtgttttgtataataccaagaaccgctgactaaatttactcaaattagggcattaaatatcatgtacttcatagtttgagactgttcactcaaatagggcagagtactattctatctagatgtgtaagtgttttttttaaaatcacatggaacggttttttttatactaaaaagtggagggagatttgtttaaacaag

SEQ ID NO: 2620 - DNA, 5702 bp, Homo sapiens
gcaatgcactgagtaacggggcgggccgagagcagtcaccaacccctctcgttgaggctgctcggttgtggccagaaacgctggctctggcattaactgtctacacccctccccttacttgggacaggaccgcatagccctcccctccccccgtcctgcaagatcttatgcggctaggtgcctgggaagtaacagcaagaggtttgatttaattttggatgagatcgttcttgcagcaagatgttaataagacaaaatctagactaaatgtgttaaatgggcttgccaacaatatggatgatttgaagataaacaccgatattactggtgctaaagaagaactcctagatgacaacaattttatctcagacaaagagagcggagttcataagccaaaagattgtcaaacatcatttcagaaaaataatacgttgactctgcctgaagaactgtcaaaggacaaatctgaaaacgccttaagtggaggccagtctagtctatttatacatgctggtgctcctactgtttctagtgaaaactttatcttgcctaaaggagctgctgttaatggaccagtttcacactcctccttaactaagacttccaatatgaataaaggcagtgtttcattaaccactggacagcctgtggatcagccaacaacagaatcttgttcaactttgaaggtagcagctgatcttcagctgtctacaccacagaaagcaagtcaacaccaagttttatttttgttatcagatgtagcacatgctaagaatcccacccattccaataaaaaactacctacctctgcttcagttggttgtgacattcagaattcagtagggagtaatataaagtcagatggcactttaataaatcaagtagaggtgggtgaggatggtgaagatttattggtgaaagatgattgtgtcaatacagtaacgggaatttcctcaggtacagatggatttaggtcagaaaatgatacaaactgggatccccaaaaagagttcattcaatttcttatgactaatgaggaaacagtagataaagctccacctcattctaaaataggtctagaaaaaaaaagaaagcgaaaaatggatgtaagcaagataactcgttataccgaggattgctttagtgattctaattgtgtacccaataaatcaaaaatgcaagaagtagactttctagaacaaaatgaagagctacaagcagtagactcacagaaatatgcattatcaaaagtgaagcctgaatcaactgatgaagacttagaatctgtggatgccttccaacatctaatttataacccagataagtgtggagaagagagttcacctgttcatactagcacttttctttcaaataccttaaaaaagaaatgtgaagagagtgattctgagtcacctgctactttcagtaccgaagagccatcattctacccctgtacaaagtgcaatgtgaattttagggagaagaagcacctccacaggcatatgatgtatcatttagatgggaatagtcactttcgccatcttaatgtcccaaggccatatgcttgtagagaatgtggacggacatttcgagatcgcaattcacttctaaaacatatgattattcaccaggagagaagacagaagttgatggaggaaattcgtgaattgaaagaacttcaggatgaaggaagaagtgcacgattacagtgtcctcagtgtgtgtttggtaccaattgccctaaaacatttgtgcaacatgctaaaacccatgaaaaagataaaaggtactactgctgtgaagagtgtaacttcatggcagtgacagaaaatgaattggaatgccatcgaggcattgcacatggggcagtggtaaaatgccctatggtcacttctgatattgcccagagaaaaacacaaaaaaagactttcatgaaagactctgtagtaggatcatccaaaaaatcagctacctacatatgtaagatgtgtccttttactacttcagccaaaagtgttttaaaaaagcacacggagtacttgcattcatcatcatgtgttgattcatttggtagtcctcttggacttgataaaagaaaaaatgacatccttgaagaacctgtagatagtgatagcactaaaacattaactaaacaacagtcaaccacatttccaaagaactctgctttaaaacaagatgtgaagcgaacatttggatcaacctcacaatcaagtagtttttcaaaaattcataagcggccacacagaatacagaaagctcggaaaagcattgcccaatcaggtgtaaacatgtgcaatcaaaacagctctcctcataagaatgttacaattaaaagcagcgttgaccaaaaacctaagtatttccatcaagcagcaaaagaaaagtctaatgccaaggcaaatagccactatttgtatagacacaaatatgaaaactataggatgatcaaaaaatcaggtgaatcatatcctgtgcatttcaaaaaagaagaagctagttcattaaattctttacacctgttttcatcatcaagtaattctcacaacaattttatttcagaccctcataagcctgacgccaaaaggcctgaaagcttcaaagatcacagacgtgtagctgtaaagagagtaattaaggaatctaagaaggaaagttctgttggaggggaagacttggatagctatccagattttttgcataaaatgactgttgtcgttttgcaaaaacttaattctgctgaaaagaaagatagttatgaaacagaagatgaaagttcctgggataatgttgagttaggagactacactacacaggccatagaagatgaaacctatagtgatattaatcaagagcatgtaaatttattccctttatttaagagcaaagtggaaggtcaggagcctggagaaaatgctactcttagttatgaccaaaacgatggcttttattttgaatactatgaagatactggaagtaacaactttttgcatgagatacatgatcctcagcatttagaaactgcagatgcttcattgtcaaagcatagttctgtttttcattggactgatttgtctcttgagaagaaatcgtgtccttactgcccagcaacatttgaaacaggtgttgggttatcaaatcatgtcagggggcatcttcacagagcaggattaagctatgaagcccgtcatgttgtatcaccagaacaaatagccacaagtgacaaaatgcagcatttcaaaagaactggcacaggaacacctgttaaacgagttagaaaagctatagagaagtctgaaaccacttctgaacacacttgtcagctctgtggtggttggtttgatactaaaattggattatcaaatcatgttagaggccacttgaaaagacttggaaagacgaaatgggatgctcacaaatctccaatctgtgttctgaatgagatgatgcaaaatgaagaaaaatatgaaaaaatcttaaaggcattgaacagtcgtcgtattattcccagaccatttgtagctcaaaaacttgcatcaagtgatgactttatatctcaaaatgttatacctcttgaagcataccgtaatggcctaaagactgaagctctgtcagtgtctgcatcagaagaagaagggctgaatttcttaaatgaatatgatgaaacaaaaccagaactgcccagtgggaaaaagaatcagtctcttacactcatagaacttcttaaaaataaaaggatgggagaagaaaggaattctgctatttctcctcaaaagatccataatcagacagcaagaaagagattcgttcagaaatgcgttcttccattaaatgaggatagtccgttgatgtatcagccacaaaaaatggacttgactatgcactcagccttagattgtaagcaaaagaaatcaaggtcaagatctggaagcaagaagaaaatgctaacattacctcatggtgctgacgaggtttacattctccgatgcaggttttgtggcctagtctttcgaggacccttgtctgttcaggaagactggattaagcacttacaacgacatattgtaaacgctaatcttccacggactggagctggcatggtggaagtcacgtcactacttaaaaagcctgcctccattacagaaacttcattttctctactaatggccgaagcagcttcatagaaccaggaaaccttttaaatagccagtttgaattggatgtaaatttgaaattctttttttttaagccacattaaattatctgtttataaatactaaagcaggaaaatggggggaaagtgaattacagtgacatcagagcaaattgaatacttaaaacagtaagtagtctatatattttatatagggtggaagatgtgtttttaaggtttatgaagttttgttggttaactgtgttcactcagtaaaagagcagtacatgtaagcagccattaataaactgttgcacatggatacttatagacagacttattggacaattatgttttttgcagtgttaccagaatcaaggctctgtttattccccacaagacttgcatagaaaaataagatattatattttgtttgtatgtatttagtgttttgtataataccaagaaccgctgactaaatttactcaaattagggcattaaatatcatgtacttcatagtttgagactgttcactcaaatagggcagagtactattctatctagatgtgtaagtgttttttttaaaatcacatggaacggttttttttatactaaaaagtggagggagatttgtttaaacaagtatttctaaaagaaatatgtacatagttctggaaattatttgtggtaaggaaatattctttactccagttgcatttctcagacaataaagtggtgcatccatgctacctcctactttgtcaacaaagatgctatttaccctttacatttttgtatcataatagattttaaaaatctaatgttctttattgcaagacattcttttgttaacaggtttgtttctttttaatgttttacctaaaatttgacatgcttacaggacaggtttgcctcttactttatttaacattgtagaaatgtaattaataaacaatgctcactacacagtttagaatagacgttctcatttatattatcttccaaatttgatcagttagcaaaacttaatacaccaattaaaatatttctacatatgagaatgtttacaatttaaattttagaacttgttttggatgtgattatatgtacgaaaatcgtgtaacactatgctcatgctaagaaccgacataacagaattactgaaataaatgtgctgtgaggaatggaaaatatggtgcaggtgtcttggtcatgataaattgtgattctttttaaaaattttttccaaaaacaattaggtattttaatctgaaatcagattcctttacaaacaacaagtttttgtatgcaagcaccattttatttcatgtagtatggctaatactatagttgaaccaaggatatgcattgattctttgcttcgtatgtaaataaagttaaaaacagttaaaataaggagtattttggtagagtatatacatacctcactgccagtgaaattgctttcctatggtatatctccttaccagaaaaatctctaaataaaaaaaggtttaaagaaaattaaaa

SEQ ID NO: 2621 - DNA, 851 bp, Homo sapiens
ggtttgacgcacacggcaccaaactgtttgatttaattttggatgagatcgttcttgcagcaagatgttaataagacaaaatctaggttattctggagcaaacccagacatatttgttatttattgatctccacctcatccccattgccttagattgtaagcaaaagaaatcaaggtcaagatctggaagcaagaagaaaatgctaacattacctcatggtgctgacgaggtttacattctccgatgcaggttttgtggcctagtctttcgaggacccttgtctgttcaggaagactggattaagcacttacaacgacatattgtaaacgctaatcttccacggactggagctggcatggtggaagtcacgtcactacttaaaaagcctgcctccattacagaaacttcattttctctactaatggccgaagcagcttcatagaaccaggaaaccttttaaatagccagtttgaattggatgtaaatttgaaattctttttttttaagccacattaaattatctgtttataaatactaaagcaggaaaatggggggaaagtgaattacagtgacatcagagcaaattgaatacttaaaacagtaagtagtctatatattttatatagggtggaagatgtgtttttaaggtttatgaagttttgttggttaactgtgttcactcagtaaaagagcagtacatgtaagcagccattaataaactgttgcacatggatacttatagacagacttattggacaattatgttttttgcagtgttaccagaatcaaggctctgtttattccccacaagacttgcatagaaaaataagatattatattttgtttgtat

SEQ ID NO: 2622 - DNA, 531 bp, Homo sapiens
gtttgatttaattttggatgagatcgttcttgcagcaagatgttaataagacaaaatctaggttattctggagcaaacccagacatatttgttatttattgatctccacctcatccccattggtaatttttttctagtttttttttttattatggtaaactatatgtaacatgaaatttgccattttaaccatttttaagtgtacagttgagtgttcctatatacatttataatgtgcactcatcaccaccatccatcttcataactttttgtcttgcgaaactgaaactctgtacccattaaacaacaattcctccgtttctcctgctcctgaggtcctggaaatcaccatttttctctctttgaatttgactaagtgtctcataagcagaatcatatagtgtttgtctttttgtgactggcttatttcacaagtgtgatgttttcacggttcattcatgttacagcattttgcagaatttcctcccattttaagtctgcataatactgtattgtatgtatgtaacacat

SEQ ID NO: 2623 - DNA, 725 bp, Homo sapiens
atgcctgtgaagcttagaacatgtgtgcattgcaatacgacgtttacaagtgctgttagcctgtccaaccacttacgcgcttatgcacgaaagaagagtgctggacttttgactggtacagccttagattgtaagcaaaagaaatcaaggtcaagatctggaagcaagaagaaaatgctaacattacctcatggtgctgacgaggtttacattctccgatgcaggttttgtggcctagtctttcgaggacccttgtctgttcaggaagactggattaagcacttacaacgacatattgtaaacgctaatcttccacggactggagctggcatggtggaagtcacgtcactacttaaaaagcctgcctccattacagaaacttcattttctctactaatggccgaagcagcttcatagaaccaggaaaccttttaaatagccagtttgaattggatgtaaatttgaaattctttttttttaagccacattaaattatctgtttataaatactaaagcaggaaaatggggggaaagtgaattacagtgacatcagagcaaattgaatacttaaaacagtaagtagtctatatattttatatagggtggaagatgtgtttttaaggtttatgaagttttgttggttaactgtgttcactcagtaaaagagcagtacatgtaagcagccattaataaactgttgcacatggatacttatagacagactt

SEQ ID NO: 2624 - DNA, 710 bp, Homo sapiens
gcggccgcggcggtcgctgggggccacggagcctgaggtctgattctctggcctttgtgtccctgggaagttactctgccagaggaaagcaggtgtgctccacttctcccgtgaacctgaagatgagttgtcccagactcttctcagtgattggaaacttaggtggtggagctaaaggttacttgttacgagacttctacagacaactcttgttgggatccatctatggtttagcaacattagtggaaaagttttcttgaatattgactttgaatataaaaacgtttatatttagacttcagattttgtgtgatcatcaaactcaacgaggggataaacataattgggggcgaatgatggtcttgtcttgttaataatttcaacagaagtatcacaacaccgccgactatcctgtccagtcctaattccacgcttgttgcatctggatggtagatttgttttaattgtgtattccctccctgcagtagtttgctttagttgtaaacattttttggtcccatgagaaggaaaacatttcaaaaaatagacaactaaagtttctcaaagaaaggaaacctggctgtttgccttcagttgcatgtgtaagtatctagggaacttgatggcagtaatattgcattttggtaggcttgctaagaaaaacctcgtttttataataaggctataatctagcttagacattttaattg

SEQ ID NO: 2625 - DNA, 540 bp, Homo sapiens
gtataggaagaatacagatagtattcttcagtacagataataccgctgtacagtacagataatattactgctattacagaatcagcaagttgaatgcatgcttcagggaatagggaaatgaatgcggactttttctaactgatttagatggtctgtctgacctctctagaaaaatatgtgtgtatgtatattttgaaatatataaggaatgttaagtctttctcttcccctttttagccttagattgtaagcaaaagaaatcaaggtcaagatctggaagcaagaagaaaatgctaacattacctcatggtgctgacgaggtttacattctccgatgcaggttttgtggcctagtctttcgaggacccttgtctgttcaggaagactggattaagcacttacaacgacatattgtaaacgctaatcttccacggactggagctggcatggtggaagtcacgtcactacttaaaaagcctgcctccattacagaaacttcattttctctactaatggccgaagcagcttcatagaaccagg

SEQ ID NO: 2626 - DNA, 820 bp, Homo sapiens
gcgtgtgacgcggggacgccgcgtgctcccaacgtcgccccggtttgacgcacacggcaccaaactgtctgattctctggcctttgtgtccctgggaagttactctgccagaggaaagcaggtgtgctccacttctcccgtgaacctgaagatgagttgtcccagactcttctcagtgattggaaacttaggtggtggagctaaaggttacttgttacgagacttctacagacaactcttgttgggatccatctatggtttagcaacattagtggaaaagttttcttgaatattgactttgaatataaaaacgtttatatttagacttcagattttgtgtgatcatcaaactcaacgaggggataaacataattgggggcgaatgatggtcttgtcttgttaataatttcaacagaagtatcacaacaccgccgactatcctgtccagtcctaattccacgcttgttgcatctggatggtagatttgttttaattgtgtattccctccctgcagtagtttgctttagttgtaaacattttttggtcccatgagaaggaaaacatttcaaaaaatagacaactaaagtttctcaaagaaaggaaacctggctgtttgccttcagttgcatgtgtaagtatctagggaacttgatggcagtaatattgcattttggtaggcttgctaagaaaaacctcgtttttataataaggctataatctagcttagacattttaattggtgaagcataaagcttgattagtattaatgcagtggtatgtattgcttttaaaagtcttacaatttctaacaaattaaagt

SEQ ID NO: 2627 - DNA, 514 bp, Homo sapiens
gctggagccgagtagcgtacagagcggcgtgtgacgcggggacgccgcgtgctcccaacgtcgccccggtttgacgcacacggcaccaaactgtttgatttaattttggatgagatcgttcttgcagcaagatgttaataagacaaaatctagactaaatgtgttaaatgggcttgccaacaatatggatgatttgaagataaacaccgatattactggtgctaaagaagaactcctagatgacaacaattttatctcagacaaagagagcggagttcataagccaaaagattgtcaaacatcatttcagaaaaataatacgttgactctgcctgaagaactgtcaaaggacaaatctgaaaacgccttaagtggaggccagtctagtctatttatacatgctggtgctcctactgtttctagtgaaaactttatcttgcctaaaggagctgctgttaatggaccagtttcacactcctccttaactaagacttccaatatgaataaaggcagt

SEQ ID NO: 2628 - DNA, 2056 bp, Homo sapiens
tgtacaaagtgcaatgtgaattttagggagaagaagcacctccacaggcatatgatgtatcatttagatgggaatagtcactttcgccatcttaatgtcccaaggccatatgcttgtagagaatgtggacggacatttcgagatcgcaattcacttctaaaacatatgattattcaccaggagagaagacagaagttgatggaggaaattcgtgaattgaaagaacttcaggatgaaggaagaagtgcacgattacagtgtcctcagtgtgtgtttggtaccaattgccctaaaacatttgtgcaacatgctaaaacccatgaaaaagataaaaggtactactgctgtgaagagtgtaacttcatggcagtgacagaaaatgaattggaatgccatcgaggcattgcacatggggcagtggtaaaatgccctatggtcacttctgatattgcccagagaaaaacacaaaaaaagactttcatgaaagactctgtagtaggatcatccaaaaaatcagctacctacatatgtaagatgtgtccttttactacttcagccaaaagtgttttaaaaaagcacacggagtacttgcattcatcatcatgtgttgattcatttggtagtcctcttggacttgataaaagaaaaaatgacatccttgaagaacctgtagatagtgatagcactaaaacattaactaaacaacagtcaaccacatttccaaagaactctgctttaaaacaagatgtgaagcgaacatttggatcaacctcacaatcaagtagtttttcaaaaattcataagcggccacacagaatacagaaagctcggaaaagcattgcccaatcaggtgtaaacatgtgcaatcaaaacagctctcctcataagaatgttacaattaaaagcagcgttgaccaaaaacctaagtatttccatcaagcagcaaaagaaaagtctaatgccaaggcaaatagccactatttgtatagacacaaatatgaaaactataggatgatcaaaaaatcaggtgaatcatatcctgtgcatttcaaaaaagaagaagctagttcattaaattctttacacctgttttcatcatcaagtaattctcacaacaattttatttcagaccctcataagcctgacgccaaaaggcctgaaagcttcaaagatcacagacgtgtagctgtaaagagagtaattaaggaatctaagaaggaaagttctgttggaggggaagacttggatagctatccagattttttgcataaaatgactgttgtcgttttgcaaaaacttaattctgctgaaaagaaagatagttatgaaacagaagatgaaagttcctgggataatgttgagttaggagactacactacacaggccatagaagatgaaacctatagtgatattaatcaagagcatgtaaatttattccctttatttaagagcaaagtggaaggtcaggagcctggagaaaatgctactcttagttatgaccaaaacgatggcttttattttgaatactatgaagatactggaagtaacaactttttgcatgagatacatgatcctcagcatttagaaactgcagatgcttcattgtcaaagcatagttctgtttttcattggactgatttgtctcttgagaagaaatcgtgtccttactgcccagcaacatttgaaacaggtgttgggttatcaaatcatgtcagggggcatcttcacagagcaggattaagctatgaagcccgtcatgttgtatcaccagaacaaatagccacaagtgacaaaatgcagcatttcaaaagaactggcacaggaacacctgttaaacgagttagaaaagctatagagaagtctgaaaccacttctgaacacacttgtcagctctgtggtggttggtttgatactaaaattggattatcaaatcatgttagaggccacttgaaaagacttggaaagacgaaatgggatgctcacaaatctccaatctgtgtttgaatgagatgatgcaaaatgaagaaaaatatgaaaaaatcttaaaggcattgaa

SEQ ID NO: 2629 - DNA, 21 bp, Artificial Sequence
  Description of Artificial Sequence: Synthetic oligonucleotide
gaagtcacgtcactacttaaa

SEQ ID NO: 2630 - DNA, 21 bp, Artificial Sequence
  Description of Artificial Sequence: Synthetic oligonucleotide
gacgaggtttacattctccga

SEQ ID NO: 2631 - DNA, 21 bp, Artificial Sequence
  Description of Artificial Sequence: Synthetic oligonucleotide
caaggtcaagatctggaagca

SEQ ID NO: 2632 - DNA, 21 bp, Artificial Sequence
  Description of Artificial Sequence: Synthetic oligonucleotide
ccagtttgaattggatgtaaa

SEQ ID NO: 2633 - DNA, 21 bp, Artificial Sequence
  Description of Artificial Sequence: Synthetic oligonucleotide
gactggattaagcacttacaa

SEQ ID NO: 2634 - DNA, 20 bp, Artificial Sequence
  Description of Artificial Sequence: Synthetic oligonucleotide
aacgctaatcttccacggac

SEQ ID NO: 2635 - DNA, 20 bp, Artificial Sequence
  Description of Artificial Sequence: Synthetic oligonucleotide
tcgaggacccttgtctgttc

SEQ ID NO: 2636 - DNA, 20 bp, Artificial Sequence
  Description of Artificial Sequence: Synthetic oligonucleotide
acaagggtcctcgaaagact

SEQ ID NO: 2637 - DNA, 20 bp, Artificial Sequence
  Description of Artificial Sequence: Synthetic oligonucleotide
taaacctcgtcagcaccatg

SEQ ID NO: 2638 - DNA, 20 bp, Artificial Sequence
  Description of Artificial Sequence: Synthetic oligonucleotide
cgaagcagcttcatagaacc

SEQ ID NO: 2639 - DNA, 20 bp, Artificial Sequence
  Description of Artificial Sequence: Synthetic oligonucleotide
cttacaatctaaggctaaaa

SEQ ID NO: 2640 - DNA, 20 bp, Artificial Sequence
  Description of Artificial Sequence: Synthetic oligonucleotide
ttgtaaacgctaatcttcca

SEQ ID NO: 2641 - DNA, 20 bp, Artificial Sequence
  Description of Artificial Sequence: Synthetic oligonucleotide
aggtttacattctccgatgc

SEQ ID NO: 2642 - protein, 1327 aa, Homo sapiens
MRSFLQQDVNKTKSRLNVLNGLANNMDDLKINTDITGAKEELLDDNNFISDKESGVHKPKDCQTSFQKNNTLTLPEELSKDKSENALSGGQSSLFIHAGAPTVSSENFILPKGAAVNGPVSHSSLTKTSNMNKGSVSLTTGQPVDQPTTESCSTLKVAADLQLSTPQKASQHQVLFLLSDVAHAKNPTHSNKKLPTSASVGCDIQNSVGSNIKSDGTLINQVEVGEDGEDLLVKDDCVNTVTGISSGTDGFRSENDTNWDPQKEFIQFLMTNEETVDKAPPHSKIGLEKKRKRKMDVSKITRYTEDCFSDSNCVPNKSKMQEVDFLEQNEELQAVDSQKYALSKVKPESTDEDLESVDAFQHLIYNPDKCGEESSPVHTSTFLSNTLKKKCEESDSESPATFSTEEPSFYPCTKCNVNFREKKHLHRHMMYHLDGNSHFRHLNVPRPYACRECGRTFRDRNSLLKHMIIHQERRQKLMEEIRELKELQDEGRSARLQCPQCVFGTNCPKTFVQHAKTHEKDKRYYCCEECNFMAVTENELECHRGIAHGAVVKCPMVTSDIAQRKTQKKTFMKDSVVGSSKKSATYICKMCPFTTSAKSVLKKHTEYLHSSSCVDSFGSPLGLDKRKNDILEEPVDSDSTKTLTKQQSTTFPKNSALKQDVKRTFGSTSQSSSFSKIHKRPHRIQKARKSIAQSGVNMCNQNSSPHKNVTIKSSVDQKPKYFHQAAKEKSNAKANSHYLYRHKYENYRMIKKSGESYPVHFKKEEASSLNSLHLFSSSSNSHNNFISDPHKPDAKRPESFKDHRRVAVKRVIKESKKESSVGGEDLDSYPDFLHKMTVVVLQKLNSAEKKDSYETEDESSWDNVELGDYTTQAIEDETYSDINQEHVNLFPLFKSKVEGQEPGENATLSYDQNDGFYFEYYEDTGSNNFLHEIHDPQHLETADASLSKHSSVFHWTDLSLEKKSCPYCPATFETGVGLSNHVRGHLHRAGLSYEARHVVSPEQIATSDKMQHFKRTGTGTPVKRVRKAIEKSETTSEHTCQLCGGWFDTKIGLSNHVRGHLKRLGKTKWDAHKSPICVLNEMMQNEEKYEKILKALNSRRIIPRPFVAQKLASSDDFISQNVIPLEAYRNGLKTEALSVSASEEEGLNFLNEYDETKPELPSGKKNQSLTLIELLKNKRMGEERNSAISPQKIHNQTARKRFVQKCVLPLNEDSPLMYQPQKMDLTMHSALDCKQKKSRSRSGSKKKMLTLPHGADEVYILRCRFCGLVFRGPLSVQEDWIKHLQRHIVNANLPRTGAGMVEVTSLLKKPASITETSFSLLMAEAAS

SEQ ID NO: 2643 - protein, 105 aa, Homo sapiens
MLIRQNLALDCKQKKSRSRSGSKKKMLTLPHGADEVYILRCRFCGLVFRGPLSVQEDWIKHLQRHIVNANLPRTGAGMVEVTSLLKKPASITETSFSLLMAEAAS

SEQ ID NO: 2644 - protein, 650 aa, Homo sapiens
MMYHLDGNSHFRHLNVPRPYACRECGRTFRDRNSLLKHMIIHQERRQKLMEEIRELKELQDEGRSARLQCPQCVFGTNCPKTFVQHAKTHEKDKRYYCCEECNFMAVTENELECHRGIAHGAVVKCPMVTSDIAQRKTQKKTFMKDSVVGSSKKSATYICKMCPFTTSAKSVLKKHTEYLHSSSCVDSFGSPLGLDKRKNDILEEPVDSDSTKTLTKQQSTTFPKNSALKQDVKRTFGSTSQSSSFSKIHKRPHRIQKARKSIAQSGVNMCNQNSSPHKNVTIKSSVDQKPKYFHQAAKEKSNAKANSHYLYRHKYENYRMIKKSGESYPVHFKKEEASSLNSLHLFSSSSNSHNNFISDPHKPDAKRPESFKDHRRVAVKRVIKESKKESSVGGEDLDSYPDFLHKMTVVVLQKLNSAEKKDSYETEDESSWDNVELGDYTTQAIEDETYSDINQEHVNLFPLFKSKVEGQEPGENATLSYDQNDGFYFEYYEDTGSNNFLHEIHDPQHLETADASLSKHSSVFHWTDLSLEKKSCPYCPATFETGVGLSNHVRGHLHRAGLSYEARHVVSPEQIATSDKMQHFKRTGTGTPVKRVRKAIEKSETTSEHTCQLCGGWFDTKIGLSNHVRGHLKRLGKTKWDAHKSPICV

SEQ ID NO: 2645-3107 - skipped (463 entries)

SEQ ID NO: 3108 - DNA, 20 bp, Artificial Sequence
  Description of Artificial Sequence: Synthetic oligonucleotide
acggaggctaagcgtcgcaa

SEQ ID NO: 3109 - RNA, 74 nt, Artificial Sequence
  Description of Artificial Sequence: Synthetic oligonucleotide
aacagcauagcaaguuaaaauaaggcuaguccguuaucaacuugaaaaaguggcaccgagucggugcuuuuuuu

SEQ ID NO: 3110 - RNA, 12 nt, Artificial Sequence
  Description of Artificial Sequence: Synthetic oligonucleotide
guuuuagagcua

SEQ ID NO: 3111 - RNA, 12 nt, Artificial Sequence
  Description of Artificial Sequence: Synthetic oligonucleotide
guuuaagagcua

SEQ ID NO: 3112 - RNA, 5 nt, Artificial Sequence
  Description of Artificial Sequence: Synthetic oligonucleotide
ugcug

SEQ ID NO: 3113 - RNA, 5 nt, Artificial Sequence
  Description of Artificial Sequence: Synthetic oligonucleotide
uuuug

SEQ ID NO: 3114 - RNA, 4 nt, Artificial Sequence
  Description of Artificial Sequence: Synthetic oligonucleotide
gaaa

SEQ ID NO: 3115 - RNA, 60 nt, Artificial Sequence
  Description of Artificial Sequence: Synthetic oligonucleotide
uagcaaguuaaaauaaggcuaguccguuaucaacuugaaaaaguggcaccgagucggugc

SEQ ID NO: 3116 - RNA, 60 nt, Artificial Sequence
  Description of Artificial Sequence: Synthetic oligonucleotide
uagcaaguuuaaauaaggcuaguccguuaucaacuugaaaaaguggcaccgagucggugc

SEQ ID NO: 3117 - RNA, 5 nt, Artificial Sequence
  Description of Artificial Sequence: Synthetic oligonucleotide
cagca

SEQ ID NO: 3118 - RNA, 5000 nt, Artificial Sequence
  Description of Artificial Sequence: Synthetic polynucleotide
  misc_feature (1)..(5000): This sequence may encompass 50-5000 nucleotides
aaaaaaaaaaaaaaaaaaaaaaaaaaaaaaaaaaaaaaaaaaaaaaaaaaaaaaaaaaaaaaaaaaaaaaaaaaaaaaaaaaaaaaaaaaaaaaaaaaaaaaaaaaaaaaaaaaaaaaaaaaaaaaaaaaaaaaaaaaaaaaaaaaaaaaaaaaaaaaaaaaaaaaaaaaaaaaaaaaaaaaaaaaaaaaaaaaaaaaaaaaaaaaaaaaaaaaaaaaaaaaaaaaaaaaaaaaaaaaaaaaaaaaaaaaaaaaaaaaaaaaaaaaaaaaaaaaaaaaaaaaaaaaaaaaaaaaaaaaaaaaaaaaaaaaaaaaaaaaaaaaaaaaaaaaaaaaaaaaaaaaaaaaaaaaaaaaaaaaaaaaaaaaaaaaaaaaaaaaaaaaaaaaaaaaaaaaaaaaaaaaaaaaaaaaaaaaaaaaaaaaaaaaaaaaaaaaaaaaaaaaaaaaaaaaaaaaaaaaaaaaaaaaaaaaaaaaaaaaaaaaaaaaaaaaaaaaaaaaaaaaaaaaaaaaaaaaaaaaaaaaaaaaaaaaaaaaaaaaaaaaaaaaaaaaaaaaaaaaaaaaaaaaaaaaaaaaaaaaaaaaaaaaaaaaaaaaaaaaaaaaaaaaaaaaaaaaaaaaaaaaaaaaaaaaaaaaaaaaaaaaaaaaaaaaaaaaaaaaaaaaaaaaaaaaaaaaaaaaaaaaaaaaaaaaaaaaaaaaaaaaaaaaaaaaaaaaaaaaaaaaaaaaaaaaaaaaaaaaaaaaaaaaaaaaaaaaaaaaaaaaaaaaaaaaaaaaaaaaaaaaaaaaaaaaaaaaaaaaaaaaaaaaaaaaaaaaaaaaaaaaaaaaaaaaaaaaaaaaaaaaaaaaaaaaaaaaaaaaaaaaaaaaaaaaaaaaaaaaaaaaaaaaaaaaaaaaaaaaaaaaaaaaaaaaaaaaaaaaaaaaaaaaaaaaaaaaaaaaaaaaaaaaaaaaaaaaaaaaaaaaaaaaaaaaaaaaaaaaaaaaaaaaaaaaaaaaaaaaaaaaaaaaaaaaaaaaaaaaaaaaaaaaaaaaaaaaaaaaaaaaaaaaaaaaaaaaaaaaaaaaaaaaaaaaaaaaaaaaaaaaaaaaaaaaaaaaaaaaaaaaaaaaaaaaaaaaaaaaaaaaaaaaaaaaaaaaaaaaaaaaaaaaaaaaaaaaaaaaaaaaaaaaaaaaaaaaaaaaaaaaaaaaaaaaaaaaaaaaaaaaaaaaaaaaaaaaaaaaaaaaaaaaaaaaaaaaaaaaaaaaaaaaaaaaaaaaaaaaaaaaaaaaaaaaaaaaaaaaaaaaaaaaaaaaaaaaaaaaaaaaaaaaaaaaaaaaaaaaaaaaaaaaaaaaaaaaaaaaaaaaaaaaaaaaaaaaaaaaaaaaaaaaaaaaaaaaaaaaaaaaaaaaaaaaaaaaaaaaaaaaaaaaaaaaaaaaaaaaaaaaaaaaaaaaaaaaaaaaaaaaaaaaaaaaaaaaaaaaaaaaaaaaaaaaaaaaaaaaaaaaaaaaaaaaaaaaaaaaaaaaaaaaaaaaaaaaaaaaaaaaaaaaaaaaaaaaaaaaaaaaaaaaaaaaaaaaaaaaaaaaaaaaaaaaaaaaaaaaaaaaaaaaaaaaaaaaaaaaaaaaaaaaaaaaaaaaaaaaaaaaaaaaaaaaaaaaaaaaaaaaaaaaaaaaaaaaaaaaaaaaaaaaaaaaaaaaaaaaaaaaaaaaaaaaaaaaaaaaaaaaaaaaaaaaaaaaaaaaaaaaaaaaaaaaaaaaaaaaaaaaaaaaaaaaaaaaaaaaaaaaaaaaaaaaaaaaaaaaaaaaaaaaaaaaaaaaaaaaaaaaaaaaaaaaaaaaaaaaaaaaaaaaaaaaaaaaaaaaaaaaaaaaaaaaaaaaaaaaaaaaaaaaaaaaaaaaaaaaaaaaaaaaaaaaaaaaaaaaaaaaaaaaaaaaaaaaaaaaaaaaaaaaaaaaaaaaaaaaaaaaaaaaaaaaaaaaaaaaaaaaaaaaaaaaaaaaaaaaaaaaaaaaaaaaaaaaaaaaaaaaaaaaaaaaaaaaaaaaaaaaaaaaaaaaaaaaaaaaaaaaaaaaaaaaaaaaaaaaaaaaaaaaaaaaaaaaaaaaaaaaaaaaaaaaaaaaaaaaaaaaaaaaaaaaaaaaaaaaaaaaaaaaaaaaaaaaaaaaaaaaaaaaaaaaaaaaaaaaaaaaaaaaaaaaaaaaaaaaaaaaaaaaaaaaaaaaaaaaaaaaaaaaaaaaaaaaaaaaaaaaaaaaaaaaaaaaaaaaaaaaaaaaaaaaaaaaaaaaaaaaaaaaaaaaaaaaaaaaaaaaaaaaaaaaaaaaaaaaaaaaaaaaaaaaaaaaaaaaaaaaaaaaaaaaaaaaaaaaaaaaaaaaaaaaaaaaaaaaaaaaaaaaaaaaaaaaaaaaaaaaaaaaaaaaaaaaaaaaaaaaaaaaaaaaaaaaaaaaaaaaaaaaaaaaaaaaaaaaaaaaaaaaaaaaaaaaaaaaaaaaaaaaaaaaaaaaaaaaaaaaaaaaaaaaaaaaaaaaaaaaaaaaaaaaaaaaaaaaaaaaaaaaaaaaaaaaaaaaaaaaaaaaaaaaaaaaaaaaaaaaaaaaaaaaaaaaaaaaaaaaaaaaaaaaaaaaaaaaaaaaaaaaaaaaaaaaaaaaaaaaaaaaaaaaaaaaaaaaaaaaaaaaaaaaaaaaaaaaaaaaaaaaaaaaaaaaaaaaaaaaaaaaaaaaaaaaaaaaaaaaaaaaaaaaaaaaaaaaaaaaaaaaaaaaaaaaaaaaaaaaaaaaaaaaaaaaaaaaaaaaaaaaaaaaaaaaaaaaaaaaaaaaaaaaaaaaaaaaaaaaaaaaaaaaaaaaaaaaaaaaaaaaaaaaaaaaaaaaaaaaaaaaaaaaaaaaaaaaaaaaaaaaaaaaaaaaaaaaaaaaaaaaaaaaaaaaaaaaaaaaaaaaaaaaaaaaaaaaaaaaaaaaaaaaaaaaaaaaaaaaaaaaaaaaaaaaaaaaaaaaaaaaaaaaaaaaaaaaaaaaaaaaaaaaaaaaaaaaaaaaaaaaaaaaaaaaaaaaaaaaaaaaaaaaaaaaaaaaaaaaaaaaaaaaaaaaaaaaaaaaaaaaaaaaaaaaaaaaaaaaaaaaaaaaaaaaaaaaaaaaaaaaaaaaaaaaaaaaaaaaaaaaaaaaaaaaaaaaaaaaaaaaaaaaaaaaaaaaaaaaaaaaaaaaaaaaaaaaaaaaaaaaaaaaaaaaaaaaaaaaaaaaaaaaaaaaaaaaaaaaaaaaaaaaaaaaaaaaaaaaaaaaaaaaaaaaaaaaaaaaaaaaaaaaaaaaaaaaaaaaaaaaaaaaaaaaaaaaaaaaaaaaaaaaaaaaaaaaaaaaaaaaaaaaaaaaaaaaaaaaaaaaaaaaaaaaaaaaaaaaaaaaaaaaaaaaaaaaaaaaaaaaaaaaaaaaaaaaaaaaaaaaaaaaaaaaaaaaaaaaaaaaaaaaaaaaaaaaaaaaaaaaaaaaaaaaaaaaaaaaaaaaaaaaaaaaaaaaaaaaaaaaaaaaaaaaaaaaaaaaaaaaaaaaaaaaaaaaaaaaaaaaaaaaaaaaaaaaaaaaaaaaaaaaaaaaaaaaaaaaaaaaaaaaaaaaaaaaaaaaaaaaaaaaaaaaaaaaaaaaaaaaaaaaaaaaaaaaaaaaaaaaaaaaaaaaaaaaaaaaaaaaaaaaaaaaaaaaaaaaaaaaaaaaaaaaaaaaaaaaaaaaaaaaaaaaaaaaaaaaaaaaaaaaaaaaaaaaaaaaaaaaaaaaaaaaaaaaaaaaaaaaaaaaaaaaaaaaaaaaaaaaaaaaaaaaaaaaaaaaaaaaaaaaaaaaaaaaaaaaaaaaaaaaaaaaaaaaaaaaaaaaaaaaaaaaaaaaaaaaaaaaaaaaaaaaaaaaaaaaaaaaaaaaaaaaaaaaaaaaaaaaaaaaaaaaaaaaaaaaaaaaaaaaaaaaaaaaaaaaaaaaaaaaaaaaaaaaaaaaaaaaaaaaaaaaaaaaaaaaaaaaaaaaaaaaaaaaaaaaaaaaaaaaaaaaaaaaaaaaaaaaaaaaaaaaaaaaaaaaaaaaaaaaaaaaaaaaaaaaaaaaaaaaaaaaaaaaaaaaaaaaaaaaaaaaaaaaaaaaaaaaaaaaaaaaaaaaaaaaaaaaaaaaaaaaaaaaaaaaaaaaaaaaaaaaaaaaaaaaaaaaaaaaaaaaaaaaaaaaaaaaaaaaaaaaaaaaaaaaaaaaaaaaaaaaaaaaaaaaaaaaaaaaaaaaaaaaaaaaaaaaaaaaaaaaaaaaaaaaaaaaaaaaaaaaaaaaaaaaaaaaaaaaaaaaaaaaaaaaaaaaaaaaaaaaaaaaaaaaaaaaaaaaaaaaaaaaaaaaaaaaaaaaaaaaaaaaaaaaaaaaaaaaaaaaaaaaaaaaaaaaaaaaaaaaaaaaaaaaaaaaaaaaaaaaaaaaaaaaaaaaaaaaaaaaaaaaaaaaaaaaaaaaaaaaaaaaaaaaaaaaaaaaaaaaaaaaaaaaaaaaaaaaaaaaaaaaaaaaaaaaaaaaaaaaaaaaaaaaaaaaaaaaaaaaaaaaaaaaaaaaaaaaaaaaaaaaaaaaaaaaaaaaaaaaaaaaaaaaaaaaaaaaaaaaaaaaaaaaaaaaaaaaaaaaaaaaaaaaaaaaaaaaaaaaaaaaaaaaaaaaaaaaaaaaaaaaaaaaaaaaaaaaaaaaaaaaaaaaaaaaaaaaaaaaaaaaaaaaaaaaaaaaaaaaaaaaaaaaaaaaaaaaaaaaaaaaaaaaaaaaaaaaaaaaaaaaaaaaaaaaaaaaaaaaaaaaaaaaaaaaaaaaaaaaaaaaaaaaaaaaaaaaaaaaaaaaaaaaaaaaaaaaaaaaaaaaaaaaaaaaaaaaaaaaaaaaaaaaaaaaaaaaaaaaaaaaaaaaaaaaaaaaaaaaaaaaaaaaaaaaaaaaaaaaaaaaaaaaaaaaaaaaaaaaaaaaaaaaaaaaaaaaaaaaaaaaaaaaaaaaaaaaaaaaaaaaaaaaaaaaaaaaaaaaaaaaaaaaaaaaaaaaaaaaaaaaaa

SEQ ID NO: 3119 - RNA, 13 nt, Artificial Sequence
  Description of Artificial Sequence: Synthetic oligonucleotide
uagcaaguuaaaa

SEQ ID NO: 3120 - RNA, 13 nt, Artificial Sequence
  Description of Artificial Sequence: Synthetic oligonucleotide
uagcaaguuuaaa

SEQ ID NO: 3121 - RNA, 47 nt, Artificial Sequence
  Description of Artificial Sequence: Synthetic oligonucleotide
uaaggcuaguccguuaucaacuugaaaaaguggcaccgagucggugc

SEQ ID NO: 3122 - RNA, 51 nt, Artificial Sequence
  Description of Artificial Sequence: Synthetic oligonucleotide
uaaggcuaguccguuaucaacuugaaaaaguggcaccgagucggugcuuuu

SEQ ID NO: 3123 - RNA, 76 nt, Artificial Sequence
  Description of Artificial Sequence: Synthetic oligonucleotide
guuuuagagcuagaaauagcaaguuaaaauaaggcuaguccguuaucaacuugaaaaaguggcaccgagucggugc

SEQ ID NO: 3124 - RNA, 76 nt, Artificial Sequence
  Description of Artificial Sequence: Synthetic oligonucleotide
guuuaagagcuagaaauagcaaguuuaaauaaggcuaguccguuaucaacuugaaaaaguggcaccgagucggugc

SEQ ID NO: 3125 - RNA, 86 nt, Artificial Sequence
  Description of Artificial Sequence: Synthetic oligonucleotide
guuuuagagcuaugcuggaaacagcauagcaaguuaaaauaaggcuaguccguuaucaacuugaaaaaguggcaccgagucggugc

SEQ ID NO: 3126 - RNA, 86 nt, Artificial Sequence
  Description of Artificial Sequence: Synthetic oligonucleotide
guuuaagagcuaugcuggaaacagcauagcaaguuuaaauaaggcuaguccguuaucaacuugaaaaaguggcaccgagucggugc

SEQ ID NO: 3127 - RNA, 17 nt, Artificial Sequence
  Description of Artificial Sequence: Synthetic oligonucleotide
guuuuagagcuaugcug

SEQ ID NO: 3128 - RNA, 17 nt, Artificial Sequence
  Description of Artificial Sequence: Synthetic oligonucleotide
guuuaagagcuaugcug

SEQ ID NO: 3129 - RNA, 22 nt, Artificial Sequence
  Description of Artificial Sequence: Synthetic oligonucleotide
guuuuagagcuaugcuguuuug

SEQ ID NO: 3130 - RNA, 22 nt, Artificial Sequence
  Description of Artificial Sequence: Synthetic oligonucleotide
guuuaagagcuaugcuguuuug

SEQ ID NO: 3131 - RNA, 65 nt, Artificial Sequence
  Description of Artificial Sequence: Synthetic oligonucleotide
cagcauagcaaguuaaaauaaggcuaguccguuaucaacuugaaaaaguggcaccgagucggugc

SEQ ID NO: 3132 - RNA, 65 nt, Artificial Sequence
  Description of Artificial Sequence: Synthetic oligonucleotide
cagcauagcaaguuuaaauaaggcuaguccguuaucaacuugaaaaaguggcaccgagucggugc

SEQ ID NO: 3133 - protein, 1368 aa, Unknown [sequence omitted]

SEQ ID NO: 3134 - protein, 7 aa, Artificial Sequence
  Description of Artificial Sequence: Synthetic peptide
PKKKRKV

SEQ ID NO: 3135 - protein, 16 aa, Artificial Sequence
  Description of Artificial Sequence: Synthetic peptide
KRPAATKKAGQAKKKK

SEQ ID NO: 3136 - protein, 9 aa, Artificial Sequence
  Description of Artificial Sequence: Synthetic peptide
PAAKRVKLD

SEQ ID NO: 3137 - protein, 11 aa, Artificial Sequence
  Description of Artificial Sequence: Synthetic peptide
RQRRNELKRSP

SEQ ID NO: 3138 - protein, 38 aa, Artificial Sequence
  Description of Artificial Sequence: Synthetic polypeptide
NQSSNFGPMKGGNFGGRSSGPYGGGGQYFAKPRNQGGY

SEQ ID NO: 3139 - protein, 42 aa, Artificial Sequence
  Description of Artificial Sequence: Synthetic polypeptide
RMRIZFKNKGKDTAELRRRRVEVSVELRKAKKDEQILKRRNV

SEQ ID NO: 3140 - protein, 8 aa, Artificial Sequence
  Description of Artificial Sequence: Synthetic peptide
VSRKRPRP

SEQ ID NO: 3141 - protein, 8 aa, Artificial Sequence
  Description of Artificial Sequence: Synthetic peptide
PPKKARED

SEQ ID NO: 3142 - protein, 8 aa, Artificial Sequence
  Description of Artificial Sequence: Synthetic peptide
PQPKKKPL

SEQ ID NO: 3143 - protein, 12 aa, Artificial Sequence
  Description of Artificial Sequence: Synthetic peptide
SALIKKKKKMAP

SEQ ID NO: 3144 - protein, 5 aa, Artificial Sequence
  Description of Artificial Sequence: Synthetic peptide
DRLRR

SEQ ID NO: 3145 - protein, 7 aa, Artificial Sequence
  Description of Artificial Sequence: Synthetic peptide
PKQKKRK

SEQ ID NO: 3146 - protein, 10 aa, Artificial Sequence
  Description of Artificial Sequence: Synthetic peptide
RKLKKKIKKL

SEQ ID NO: 3147 - protein, 10 aa, Artificial Sequence
  Description of Artificial Sequence: Synthetic peptide
REKKKFLKRR

SEQ ID NO: 3148 - protein, 20 aa, Artificial Sequence
  Description of Artificial Sequence: Synthetic peptide
KRKGDEVDGVDEVAKKKSKK

SEQ ID NO: 3149 - protein, 17 aa, Artificial Sequence
  Description of Artificial Sequence: Synthetic peptide
RKCLQAGMNLEARKTKK

SEQ ID NO: 3150 - DNA, 4107 bp, Artificial Sequence
  Description of Artificial Sequence: Synthetic polynucleotide
atggataaaaagtacagcatcgggctggacatcggtacaaactcagtggggtgggccgtgattacggacgagtacaaggtaccctccaaaaaatttaaagtgctgggtaacacggacagacactctataaagaaaaatcttattggagccttgctgttcgactcaggcgagacagccgaagccacaaggttgaagcggaccgccaggaggcggtataccaggagaaagaaccgcatatgctacctgcaagaaatcttcagtaacgagatggcaaaggttgacgatagctttttccatcgcctggaagaatcctttcttgttgaggaagacaagaagcacgaacggcaccccatctttggcaatattgtcgacgaagtggcatatcacgaaaagtacccgactatctaccacctcaggaagaagctggtggactctaccgataaggcggacctcagacttatttatttggcactcgcccacatgattaaatttagaggacatttcttgatcgagggcgacctgaacccggacaacagtgacgtcgataagctgttcatccaacttgtgcagacctacaatcaactgttcgaagaaaaccctataaatgcttcaggagtcgacgctaaagcaatcctgtccgcgcgcctctcaaaatctagaagacttgagaatctgattgctcagttgcccggggaaaagaaaaatggattgtttggcaacctgatcgccctcagtctcggactgaccccaaatttcaaaagtaacttcgacctggccgaagacgctaagctccagctgtccaaggacacatacgatgacgacctcgacaatctgctggcccagattggggatcagtacgccgatctctttttggcagcaaagaacctgtccgacgccatcctgttgagcgatatcttgagagtgaacaccgaaattactaaagcaccccttagcgcatctatgatcaagcggtacgacgagcatcatcaggatctgaccctgctgaaggctcttgtgaggcaacagctccccgaaaaatacaaggaaatcttctttgaccagagcaaaaacggctacgctggctatatagatggtggggccagtcaggaggaattctataaattcatcaagcccattctcgagaaaatggacggcacagaggagttgctggtcaaacttaacagggaggacctgctgcggaagcagcggacctttgacaacgggtctatcccccaccagattcatctgggcgaactgcacgcaatcctgaggaggcaggaggatttttatccttttcttaaagataaccgcgagaaaatagaaaagattcttacattcaggatcccgtactacgtgggacctctcgcccggggcaattcacggtttgcctggatgacaaggaagtcagaggagactattacaccttggaacttcgaagaagtggtggacaagggtgcatctgcccagtctttcatcgagcggatgacaaattttgacaagaacctccctaatgagaaggtgctgcccaaacattctctgctctacgagtactttaccgtctacaatgaactgactaaagtcaagtacgtcaccgagggaatgaggaagccggcattccttagtggagaacagaagaaggcgattgtagacctgttgttcaagaccaacaggaaggtgactgtgaagcaacttaaagaagactactttaagaagatcgaatgttttgacagtgtggaaatttcaggggttgaagaccgcttcaatgcgtcattggggacttaccatgatcttctcaagatcataaaggacaaagacttcctggacaacgaagaaaatgaggatattctcgaagacatcgtcctcaccctgaccctgttcgaagacagggaaatgatagaagagcgcttgaaaacctatgcccacctcttcgacgataaagttatgaagcagctgaagcgcaggagatacacaggatggggaagattgtcaaggaagctgatcaatggaattagggataaacagagtggcaagaccatactggatttcctcaaatctgatggcttcgccaataggaacttcatgcaactgattcacgatgactctcttaccttcaaggaggacattcaaaaggctcaggtgagcgggcagggagactcccttcatgaacacatcgcgaatttggcaggttcccccgctattaaaaagggcatccttcaaactgtcaaggtggtggatgaattggtcaaggtaatgggcagacataagccagaaaatattgtgatcgagatggcccgcgaaaaccagaccacacagaagggccagaaaaatagtagagagcggatgaagaggatcgaggagggcatcaaagagctgggatctcagattctcaaagaacaccccgtagaaaacacacagctgcagaacgaaaaattgtacttgtactatctgcagaacggcagagacatgtacgtcgaccaagaacttgatattaatagactgtccgactatgacgtagaccatatcgtgccccagtccttcctgaaggacgactccattgataacaaagtcttgacaagaagcgacaagaacaggggtaaaagtgataatgtgcctagcgaggaggtggtgaaaaaaatgaagaactactggcgacagctgcttaatgcaaagctcattacacaacggaagttcgataatctgacgaaagcagagagaggtggcttgtctgagttggacaaggcagggtttattaagcggcagctggtggaaactaggcagatcacaaagcacgtggcgcagattttggacagccggatgaacacaaaatacgacgaaaatgataaactgatacgagaggtcaaagttatcacgctgaaaagcaagctggtgtccgattttcggaaagacttccagttctacaaagttcgcgagattaataactaccatcatgctcacgatgcgtacctgaacgctgttgtcgggaccgccttgataaagaagtacccaaagctggaatccgagttcgtatacggggattacaaagtgtacgatgtgaggaaaatgatagccaagtccgagcaggagattggaaaggccacagctaagtacttcttttattctaacatcatgaatttttttaagacggaaattaccctggccaacggagagatcagaaagcggccccttatagagacaaatggtgaaacaggtgaaatcgtctgggataagggcagggatttcgctactgtgaggaaggtgctgagtatgccacaggtaaatatcgtgaaaaaaaccgaagtacagaccggaggattttccaaggaaagcattttgcctaaaagaaactcagacaagctcatcgcccgcaagaaagattgggaccctaagaaatacgggggatttgactcacccaccgtagcctattctgtgctggtggtagctaaggtggaaaaaggaaagtctaagaagctgaagtccgtgaaggaactcttgggaatcactatcatggaaagatcatcctttgaaaagaaccctatcgatttcctggaggctaagggttacaaggaggtcaagaaagacctcatcattaaactgccaaaatactctctcttcgagctggaaaatggcaggaagagaatgttggccagcgccggagagctgcaaaagggaaacgagcttgctctgccctccaaatatgttaattttctctatctcgcttcccactatgaaaagctgaaagggtctcccgaagataacgagcagaagcagctgttcgtcgaacagcacaagcactatctggatgaaataatcgaacaaataagcgagttcagcaaaagggttatcctggcggatgctaatttggacaaagtactgtctgcttataacaagcaccgggataagcctattagggaacaagccgagaatataattcacctctttacactcacgaatctcggagcccccgccgccttcaaatactttgatacgactatcgaccggaaacggtataccagtaccaaagaggtcctcgatgccaccctcatccaccagtcaattactggcctgtacgaaacacggatcgacctctctcaactgggcggcgactag

SEQ ID NO: 3151 - DNA, 4164 bp, Artificial Sequence
  Description of Artificial Sequence: Synthetic polynucleotide
atggctccgaagaaaaagcgtaaagtggataaaaaatacagcattggtctggacattggcacgaactcagtgggttgggcggtcatcacggatgaatataaggtcccgtcaaaaaagttcaaagtgctgggcaacaccgatcgccattcgattaaaaagaatctgatcggcgcgctgctgtttgatagcggtgaaaccgcggaagcaacgcgtctgaaacgtaccgcacgtcgccgttacacgcgccgtaaaaatcgtattctgtatctgcaggaaatctttagcaacgaaatggcgaaagttgatgactcatttttccaccgcctggaagaatcgtttctggtcgaagaagacaaaaagcatgaacgtcacccgattttcggtaatatcgttgatgaagtcgcgtaccatgaaaaatatccgacgatttaccatctgcgtaaaaaactggtggattcaaccgacaaagccgatctgcgcctgatttacctggcactggctcatatgatcaaatttcgtggccacttcctgattgaaggtgacctgaacccggataactctgacgttgataagctgttcatccagctggtccaaacctataatcagctgttcgaagaaaacccgatcaatgcaagtggcgttgatgcgaaggccattctgtccgctcgcctgagtaaatcccgccgtctggaaaacctgattgcacaactgccgggcgaaaagaaaaacggcctgtttggtaatctgatcgctctgtcactgggtctgacgccgaactttaaatcgaatttcgacctggcagaagatgctaagctgcagctgagcaaagatacctacgatgacgatctggacaacctgctggcgcaaattggtgaccagtatgccgacctgtttctggcggccaaaaatctgtcagatgccattctgctgtcggacatcctgcgcgtgaacaccgaaatcacgaaagcgccgctgtcagcctcgatgattaaacgctacgatgaacatcaccaggacctgaccctgctgaaagcactggttcgtcagcaactgccggaaaagtacaaggaaattttctttgaccaatctaagaacggctatgcaggttacatcgatggcggtgctagtcaggaagaattctacaagttcatcaagccgatcctggaaaaaatggatggcacggaagaactgctggtgaaactgaatcgtgaagatctgctgcgtaaacaacgcacctttgacaacggcagcattccgcatcagatccacctgggtgaactgcatgcgattctgcgccgtcaggaagatttttatccgttcctgaaagacaaccgtgaaaaaattgaaaagatcctgacgtttcgcatcccgtattacgttggcccgctggcgcgtggtaatagccgcttcgcctggatgacccgcaaatctgaagaaaccattacgccgtggaactttgaagaagtggttgataaaggtgcaagcgctcagtcttttatcgaacgtatgaccaatttcgataaaaacctgccgaatgaaaaggtcctgccgaaacatagcctgctgtatgaatactttaccgtgtacaacgaactgacgaaagtgaagtatgttaccgaaggcatgcgcaaaccggcgtttctgtctggtgaacagaaaaaagccattgtggatctgctgttcaagaccaatcgtaaagttacggtcaaacagctgaaggaagattacttcaaaaagatcgaagaattcgacagcgtggaaatttctggcgttgaagatcgtttcaacgccagtctgggtacctatcatgacctgctgaagatcatcaaggacaaggattttctggataacgaagaaaatgaagacattctggaagatatcgtgctgaccctgacgctgttcgaagatcgtgaaatgattgaagaacgcctgaaaacgtacgcacacctgtttgacgataaagttatgaagcagctgaaacgccgtcgctataccggctggggtcgtctgtctcgcaaactgattaatggcatccgcgataagcaaagtggtaaaacgattctggatttcctgaaatccgacggctttgccaaccgtaatttcatgcagctgatccatgacgatagtctgacctttaaggaagacattcagaaagcacaagtgtcaggccagggtgattcgctgcatgaacacattgcgaacctggccggctccccggctattaaaaagggtatcctgcagaccgtcaaagtcgtggatgaactggtgaaggttatgggccgtcacaaaccggaaaacattgtgatcgaaatggcgcgcgaaaatcagaccacgcaaaagggtcagaaaaactcacgtgaacgcatgaagcgcattgaagaaggcatcaaagaactgggttcgcagattctgaaagaacatccggttgaaaacacccagctgcaaaatgaaaaactgtacctgtattacctgcaaaatggccgtgacatgtatgtcgatcaggaactggacatcaaccgcctgagcgactatgatgtcgaccacattgtgccgcagagctttctgaaggacgattctatcgataataaagtgctgacccgttctgataagaaccgcggtaaaagcgacaatgttccgtctgaagaagttgtcaaaaagatgaagaactactggcgtcaactgctgaatgcgaagctgattacgcagcgtaaattcgataacctgaccaaggcggaacgcggcggtctgagtgaactggataaggccggctttatcaaacgtcaactggtggaaacccgccagattacgaaacatgttgcccagatcctggattcccgcatgaacacgaaatatgacgaaaatgataagctgattcgtgaagtcaaagtgatcaccctgaagagtaagctggtgtccgatttccgtaaggactttcagttctacaaagttcgcgaaattaacaattaccatcacgcacacgatgcttatctgaatgcagtggttggcaccgctctgatcaaaaagtatccgaaactggaaagcgaatttgtgtatggtgattacaaagtctatgacgtgcgcaagatgattgcgaaaagtgaacaggaaatcggcaaggcgaccgccaagtactttttctattccaacatcatgaactttttcaagaccgaaatcacgctggcaaatggcgaaattcgtaaacgcccgctgatcgaaaccaacggcgaaacgggtgaaattgtgtgggataaaggtcgtgacttcgcgaccgttcgcaaagtcctgtcaatgccgcaagtgaatatcgttaaaaagaccgaagttcagacgggcggttttagtaaagaatccatcctgccgaagcgtaactcggataaactgattgcgcgcaaaaaggattgggacccgaaaaagtacggcggttttgatagtccgaccgttgcatattccgtcctggtcgtggctaaagttgaaaaaggcaagagtaaaaagctgaagtccgtcaaagaactgctgggtattaccatcatggaacgtagctcttttgaaaagaacccgattgacttcctggaagccaagggctacaaagaagtgaaaaaggatctgattatcaagctgccgaaatattcgctgttcgaactggaaaacggtcgtaaacgcatgctggcaagcgctggcgaactgcagaagggtaatgaactggcactgccgtctaaatatgtgaactttctgtacctggctagccattatgaaaaactgaagggttctccggaagataacgaacagaagcaactgttcgttgaacaacataaacactacctggatgaaatcatcgaacagatctcagaattctcgaaacgcgtcattctggcggatgccaatctggacaaagtgctgagcgcgtataacaagcatcgtgataaaccgattcgcgaacaggccgaaaatattatccacctgtttaccctgacgaacctgggcgcaccggcagcttttaaatacttcgataccacgatcgaccgtaagcgctataccagcacgaaagaagttctggatgctaccctgattcatcagtcaatcaccggtctgtatgaaacgcgtattgacctgagccaactgggcggtgatagccgtgccgaccatcaccatcaccatcactaatag

SEQ ID NO: 3152 - RNA, 74 nt, Artificial Sequence; identical to SEQ ID NO: 3109
  Description of Artificial Sequence: Synthetic oligonucleotide

SEQ ID NO: 3153 - RNA, 74 nt, Artificial Sequence
  Description of Artificial Sequence: Synthetic oligonucleotide
aacagcauagcaaguuuaaauaaggcuaguccguuaucaacuugaaaaaguggcaccgagucggugcuuuuuuu

SEQ ID NO: 3154 - RNA, 16 nt, Artificial Sequence
  Description of Artificial Sequence: Synthetic oligonucleotide
guuuuagagcuaugcu

SEQ ID NO: 3155 - RNA, 90 nt, Artificial Sequence
  Description of Artificial Sequence: Synthetic oligonucleotide
guuuaagagcuaugcuggaaacagcauagcaaguuuaaauaaggcuaguccguuaucaacuugaaaaaguggcaccgagucggugcuuuu

SEQ ID NO: 3156 - RNA, 67 nt, Artificial Sequence
  Description of Artificial Sequence: Synthetic oligonucleotide
agcauagcaaguuaaaauaaggcuaguccguuaucaacuugaaaaaguggcaccgagucggugcuuu

SEQ ID NO: 3157 - RNA, 85 nt, Artificial Sequence
  Description of Artificial Sequence: Synthetic oligonucleotide
guuggaaccauucaaaacagcauagcaaguuaaaauaaggcuaguccguuaucaacuugaaaaaguggcaccgagucggugcuuu

SEQ ID NO: 3158 - protein, 7 aa, Artificial Sequence
  Description of Artificial Sequence: Synthetic peptide
ENLYFQG

SEQ ID NO: 3159 - RNA, 80 nt, Artificial Sequence
  Description of Artificial Sequence: Synthetic oligonucleotide
guuuuagagcuagaaauagcaaguuaaaauaaggcuaguccguuaucaacuugaaaaaguggcaccgagucggugcuuuu

SEQ ID NO: 3160 - RNA, 67 nt, Artificial Sequence
  Description of Artificial Sequence: Synthetic oligonucleotide
aacagcauagcaaguuaaaauaaggcuaguccguuaucaacuugaaaaaguggcaccgagucggugc

SEQ ID NO: 3161 - protein, 1393 aa, Artificial Sequence
  Description of Artificial Sequence: Synthetic polypeptide
MAPKKKRKVDKKYSIGLDIGTNSVGWAVITDEYKVPSKKFKVLGNTDRHSIKKNLIGALLFDSGETAEATRLKRTARRRYTRRKNRICYLQEIFSNEMAKVDDSFFHRLEESFLVEEDKKHERHPIFGNIVDEVAYHEKYPTIYHLRKKLVDSTDKADLRLIYLALAHMIKFRGHFLIEGDLNPDNSDVDKLFIQLVQTYNQLFEENPINASGVDAKAILSARLSKSRRLENLIAQLPGEKKNGLFGNLIALSLGLTPNFKSNFDLAEDAKLQLSKDTYDDDLDNLLAQIGDQYADLFLAAKNLSDAILLSDILRVNTEITKAPLSASMIKRYDEHHQDLTLLKALVRQQLPEKYKEIFFDQSKNGYAGYIDGGASQEEFYKFIKPILEKMDGTEELLVKLNREDLLRKQRTFDNGSIPHQIHLGELHAILRRQEDFYPFLKDNREKIEKILTFRIPYYVGPLARGNSRFAWMTRKSEETITPWNFEEVVDKGASAQSFIERMTNFDKNLPNEKVLPKHSLLYEYFTVYNELTKVKYVTEGMRKPAFLSGEQKKAIVDLLFKTNRKVTVKQLKEDYFKKIECFDSVEISGVEDRFNASLGTYHDLLKIIKDKDFLDNEENEDILEDIVLTLTLFEDREMIEERLKTYAHLFDDKVMKQLKRRRYTGWGRLSRKLINGIRDKQSGKTILDFLKSDGFANRNFMQLIHDDSLTFKEDIQKAQVSGQGDSLHEHIANLAGSPAIKKGILQTVKVVDELVKVMGRHKPENIVIEMARENQTTQKGQKNSRERMKRIEEGIKELGSQILKEHPVENTQLQNEKLYLYYLQNGRDMYVDQELDINRLSDYDVDHIVPQSFLKDDSIDNKVLTRSDKNRGKSDNVPSEEVVKKMKNYWRQLLNAKLITQRKFDNLTKAERGGLSELDKAGFIKRQLVETRQITKHVAQILDSRMNTKYDENDKLIREVKVITLKSKLVSDFRKDFQFYKVREINNYHHAHDAYLNAVVGTALIKKYPKLESEFVYGDYKVYDVRKMIAKSEQEIGKATAKYFFYSNIMNFFKTEITLANGEIRKRPLIETNGETGEIVWDKGRDFATVRKVLSMPQVNIVKKTEVQTGGFSKESILPKRNSDKLIARKKDWDPKKYGGFDSPTVAYSVLVVAKVEKGKSKKLKSVKELLGITIMERSSFEKNPIDFLEAKGYKEVKKDLIIKLPKYSLFELENGRKRMLASAGELQKGNELALPSKYVNFLYLASHYEKLKGSPEDNEQKQLFVEQHKHYLDEIIEQISEFSKRVILADANLDKVLSAYNKHRDKPIREQAENIIHLFTLTNLGAPAAFKYFDTTIDRKRYTSTKEVLDATLIHQSITGLYETRIDLSQLGGDSRADPKKKRKVHHHHHH

SEQ ID NO: 3162 - protein, 1393 aa, Artificial Sequence
  Description of Artificial Sequence: Synthetic polypeptide
MAPKKKRKVDKKYSIGLDIGTNSVGWAVITDEYKVPSKKFKVLGNTDRHSIKKNLIGALLFDSGETAEATRLKRTARRRYTRRKNRILYLQEIFSNEMAKVDDSFFHRLEESFLVEEDKKHERHPIFGNIVDEVAYHEKYPTIYHLRKKLVDSTDKADLRLIYLALAHMIKFRGHFLIEGDLNPDNSDVDKLFIQLVQTYNQLFEENPINASGVDAKAILSARLSKSRRLENLIAQLPGEKKNGLFGNLIALSLGLTPNFKSNFDLAEDAKLQLSKDTYDDDLDNLLAQIGDQYADLFLAAKNLSDAILLSDILRVNTEITKAPLSASMIKRYDEHHQDLTLLKALVRQQLPEKYKEIFFDQSKNGYAGYIDGGASQEEFYKFIKPILEKMDGTEELLVKLNREDLLRKQRTFDNGSIPHQIHLGELHAILRRQEDFYPFLKDNREKIEKILTFRIPYYVGPLARGNSRFAWMTRKSEETITPWNFEEVVDKGASAQSFIERMTNFDKNLPNEKVLPKHSLLYEYFTVYNELTKVKYVTEGMRKPAFLSGEQKKAIVDLLFKTNRKVTVKQLKEDYFKKIEEFDSVEISGVEDRFNASLGTYHDLLKIIKDKDFLDNEENEDILEDIVLTLTLFEDREMIEERLKTYAHLFDDKVMKQLKRRRYTGWGRLSRKLINGIRDKQSGKTILDFLKSDGFANRNFMQLIHDDSLTFKEDIQKAQVSGQGDSLHEHIANLAGSPAIKKGILQTVKVVDELVKVMGRHKPENIVIEMARENQTTQKGQKNSRERMKRIEEGIKELGSQILKEHPVENTQLQNEKLYLYYLQNGRDMYVDQELDINRLSDYDVDHIVPQSFLKDDSIDNKVLTRSDKNRGKSDNVPSEEVVKKMKNYWRQLLNAKLITQRKFDNLTKAERGGLSELDKAGFIKRQLVETRQITKHVAQILDSRMNTKYDENDKLIREVKVITLKSKLVSDFRKDFQFYKVREINNYHHAHDAYLNAVVGTALIKKYPKLESEFVYGDYKVYDVRKMIAKSEQEIGKATAKYFFYSNIMNFFKTEITLANGEIRKRPLIETNGETGEIVWDKGRDFATVRKVLSMPQVNIVKKTEVQTGGFSKESILPKRNSDKLIARKKDWDPKKYGGFDSPTVAYSVLVVAKVEKGKSKKLKSVKELLGITIMERSSFEKNPIDFLEAKGYKEVKKDLIIKLPKYSLFELENGRKRMLASAGELQKGNELALPSKYVNFLYLASHYEKLKGSPEDNEQKQLFVEQHKHYLDEIIEQISEFSKRVILADANLDKVLSAYNKHRDKPIREQAENIIHLFTLTNLGAPAAFKYFDTTIDRKRYTSTKEVLDATLIHQSITGLYETRIDLSQLGGDSRADPKKKRKVHHHHHH

SEQ ID NO: 3163 - protein, 1399 aa, Artificial Sequence
  Description of Artificial Sequence: Synthetic polypeptide
MGSSHHHHHHHHENLYFQGSMDKKYSIGLDIGTNSVGWAVITDEYKVPSKKFKVLGNTDRHSIKKNLIGALLFDSGETAEATRLKRTARRRYTRRKNRICYLQEIFSNEMAKVDDSFFHRLEESFLVEEDKKHERHPIFGNIVDEVAYHEKYPTIYHLRKKLVDSTDKADLRLIYLALAHMIKFRGHFLIEGDLNPDNSDVDKLFIQLVQTYNQLFEENPINASGVDAKAILSARLSKSRRLENLIAQLPGEKKNGLFGNLIALSLGLTPNFKSNFDLAEDAKLQLSKDTYDDDLDNLLAQIGDQYADLFLAAKNLSDAILLSDILRVNTEITKAPLSASMIKRYDEHHQDLTLLKALVRQQLPEKYKEIFFDQSKNGYAGYIDGGASQEEFYKFIKPILEKMDGTEELLVKLNREDLLRKQRTFDNGSIPHQIHLGELHAILRRQEDFYPFLKDNREKIEKILTFRIPYYVGPLARGNSRFAWMTRKSEETITPWNFEEVVDKGASAQSFIERMTNFDKNLPNEKVLPKHSLLYEYFTVYNELTKVKYVTEGMRKPAFLSGEQKKAIVDLLFKTNRKVTVKQLKEDYFKKIECFDSVEISGVEDRFNASLGTYHDLLKIIKDKDFLDNEENEDILEDIVLTLTLFEDREMIEERLKTYAHLFDDKVMKQLKRRRYTGWGRLSRKLINGIRDKQSGKTILDFLKSDGFANRNFMQLIHDDSLTFKEDIQKAQVSGQGDSLHEHIANLAGSPAIKKGILQTVKVVDELVKVMGRHKPENIVIEMARENQTTQKGQKNSRERMKRIEEGIKELGSQILKEHPVENTQLQNEKLYLYYLQNGRDMYVDQELDINRLSDYDVDHIVPQSFLKDDSIDNKVLTRSDKNRGKSDNVPSEEVVKKMKNYWRQLLNAKLITQRKFDNLTKAERGGLSELDKAGFIKRQLVETRQITKHVAQILDSRMNTKYDENDKLIREVKVITLKSKLVSDFRKDFQFYKVREINNYHHAHDAYLNAVVGTALIKKYPKLESEFVYGDYKVYDVRKMIAKSEQEIGKATAKYFFYSNIMNFFKTEITLANGEIRKRPLIETNGETGEIVWDKGRDFATVRKVLSMPQVNIVKKTEVQTGGFSKESILPKRNSDKLIARKKDWDPKKYGGFDSPTVAYSVLVVAKVEKGKSKKLKSVKELLGITIMERSSFEKNPIDFLEAKGYKEVKKDLIIKLPKYSLFELENGRKRMLASAGELQKGNELALPSKYVNFLYLASHYEKLKGSPEDNEQKQLFVEQHKHYLDEIIEQISEFSKRVILADANLDKVLSAYNKHRDKPIREQAENIIHLFTLTNLGAPAAFKYFDTTIDRKRYTSTKEVLDATLIHQSITGLYETRIDLSQLGGDGGGSPKKKRKV

SEQ ID NO: 3164 - protein, 1396 aa, Artificial Sequence
  Description of Artificial Sequence: Synthetic polypeptide
MAHHHHHHGGSPKKKRKVDKKYSIGLDIGTNSVGWAVITDEYKVPSKKFKVLGNTDRHSIKKNLIGALLFDSGETAEATRLKRTARRRYTRRKNRICYLQEIFSNEMAKVDDSFFHRLEESFLVEEDKKHERHPIFGNIVDEVAYHEKYPTIYHLRKKLVDSTDKADLRLIYLALAHMIKFRGHFLIEGDLNPDNSDVDKLFIQLVQTYNQLFEENPINASGVDAKAILSARLSKSRRLENLIAQLPGEKKNGLFGNLIALSLGLTPNFKSNFDLAEDAKLQLSKDTYDDDLDNLLAQIGDQYADLFLAAKNLSDAILLSDILRVNTEITKAPLSASMIKRYDEHHQDLTLLKALVRQQLPEKYKEIFFDQSKNGYAGYIDGGASQEEFYKFIKPILEKMDGTEELLVKLNREDLLRKQRTFDNGSIPHQIHLGELHAILRRQEDFYPFLKDNREKIEKILTFRIPYYVGPLARGNSRFAWMTRKSEETITPWNFEEVVDKGASAQSFIERMTNFDKNLPNEKVLPKHSLLYEYFTVYNELTKVKYVTEGMRKPAFLSGEQKKAIVDLLFKTNRKVTVKQLKEDYFKKIECFDSVEISGVEDRFNASLGTYHDLLKIIKDKDFLDNEENEDILEDIVLTLTLFEDREMIEERLKTYAHLFDDKVMKQLKRRRYTGWGRLSRKLINGIRDKQSGKTILDFLKSDGFANRNFMQLIHDDSLTFKEDIQKAQVSGQGDSLHEHIANLAGSPAIKKGILQTVKVVDELVKVMGRHKPENIVIEMARENQTTQKGQKNSRERMKRIEEGIKELGSQILKEHPVENTQLQNEKLYLYYLQNGRDMYVDQELDINRLSDYDVDHIVPQSFLKDDSIDNKVLTRSDKNRGKSDNVPSEEVVKKMKNYWRQLLNAKLITQRKFDNLTKAERGGLSELDKAGFIKRQLVETRQITKHVAQILDSRMNTKYDENDKLIREVKVITLKSKLVSDFRKDFQFYKVREINNYHHAHDAYLNAVVGTALIKKYPKLESEFVYGDYKVYDVRKMIAKSEQEIGKATAKYFFYSNIMNFFKTEITLANGEIRKRPLIETNGETGEIVWDKGRDFATVRKVLSMPQVNIVKKTEVQTGGFSKESILPKRNSDKLIARKKDWDPKKYGGFDSPTVAYSVLVVAKVEKGKSKKLKSVKELLGITIMERSSFEKNPIDFLEAKGYKEVKKDLIIKLPKYSLFELENGRKRMLASAGELQKGNELALPSKYVNFLYLASHYEKLKGSPEDNEQKQLFVEQHKHYLDEIIEQISEFSKRVILADANLDKVLSAYNKHRDKPIREQAENIIHLFTLTNLGAPAAFKYFDTTIDRKRYTSTKEVLDATLIHQSITGLYETRIDLSQLGGDSRADPKKKRKV

SEQ ID NO: 3165 - protein, 1386 aa, Artificial Sequence
  Description of Artificial Sequence: Synthetic polypeptide
MAPKKKRKVDKKYSIGLDIGTNSVGWAVITDEYKVPSKKFKVLGNTDRHSIKKNLIGALLFDSGETAEATRLKRTARRRYTRRKNRICYLQEIFSNEMAKVDDSFFHRLEESFLVEEDKKHERHPIFGNIVDEVAYHEKYPTIYHLRKKLVDSTDKADLRLIYLALAHMIKFRGHFLIEGDLNPDNSDVDKLFIQLVQTYNQLFEENPINASGVDAKAILSARLSKSRRLENLIAQLPGEKKNGLFGNLIALSLGLTPNFKSNFDLAEDAKLQLSKDTYDDDLDNLLAQIGDQYADLFLAAKNLSDAILLSDILRVNTEITKAPLSASMIKRYDEHHQDLTLLKALVRQQLPEKYKEIFFDQSKNGYAGYIDGGASQEEFYKFIKPILEKMDGTEELLVKLNREDLLRKQRTFDNGSIPHQIHLGELHAILRRQEDFYPFLKDNREKIEKILTFRIPYYVGPLARGNSRFAWMTRKSEETITPWNFEEVVDKGASAQSFIERMTNFDKNLPNEKVLPKHSLLYEYFTVYNELTKVKYVTEGMRKPAFLSGEQKKAIVDLLFKTNRKVTVKQLKEDYFKKIECFDSVEISGVEDRFNASLGTYHDLLKIIKDKDFLDNEENEDILEDIVLTLTLFEDREMIEERLKTYAHLFDDKVMKQLKRRRYTGWGRLSRKLINGIRDKQSGKTILDFLKSDGFANRNFMQLIHDDSLTFKEDIQKAQVSGQGDSLHEHIANLAGSPAIKKGILQTVKVVDELVKVMGRHKPENIVIEMARENQTTQKGQKNSRERMKRIEEGIKELGSQILKEHPVENTQLQNEKLYLYYLQNGRDMYVDQELDINRLSDYDVDHIVPQSFLKDDSIDNKVLTRSDKNRGKSDNVPSEEVVKKMKNYWRQLLNAKLITQRKFDNLTKAERGGLSELDKAGFIKRQLVETRQITKHVAQILDSRMNTKYDENDKLIREVKVITLKSKLVSDFRKDFQFYKVREINNYHHAHDAYLNAVVGTALIKKYPKLESEFVYGDYKVYDVRKMIAKSEQEIGKATAKYFFYSNIMNFFKTEITLANGEIRKRPLIETNGETGEIVWDKGRDFATVRKVLSMPQVNIVKKTEVQTGGFSKESILPKRNSDKLIARKKDWDPKKYGGFDSPTVAYSVLVVAKVEKGKSKKLKSVKELLGITIMERSSFEKNPIDFLEAKGYKEVKKDLIIKLPKYSLFELENGRKRMLASAGELQKGNELALPSKYVNFLYLASHYEKLKGSPEDNEQKQLFVEQHKHYLDEIIEQISEFSKRVILADANLDKVLSAYNKHRDKPIREQAENIIHLFTLTNLGAPAAFKYFDTTIDRKRYTSTKEVLDATLIHQSITGLYETRIDLSQLGGDSRADHHHHHH

SEQ ID NO: 3166 - protein, 1389 aa, Artificial Sequence
  Description of Artificial Sequence: Synthetic polypeptide
MAHHHHHHGGSDKKYSIGLDIGTNSVGWAVITDEYKVPSKKFKVLGNTDRHSIKKNLIGALLFDSGETAEATRLKRTARRRYTRRKNRICYLQEIFSNEMAKVDDSFFHRLEESFLVEEDKKHERHPIFGNIVDEVAYHEKYPTIYHLRKKLVDSTDKADLRLIYLALAHMIKFRGHFLIEGDLNPDNSDVDKLFIQLVQTYNQLFEENPINASGVDAKAILSARLSKSRRLENLIAQLPGEKKNGLFGNLIALSLGLTPNFKSNFDLAEDAKLQLSKDTYDDDLDNLLAQIGDQYADLFLAAKNLSDAILLSDILRVNTEITKAPLSASMIKRYDEHHQDLTLLKALVRQQLPEKYKEIFFDQSKNGYAGYIDGGASQEEFYKFIKPILEKMDGTEELLVKLNREDLLRKQRTFDNGSIPHQIHLGELHAILRRQEDFYPFLKDNREKIEKILTFRIPYYVGPLARGNSRFAWMTRKSEETITPWNFEEVVDKGASAQSFIERMTNFDKNLPNEKVLPKHSLLYEYFTVYNELTKVKYVTEGMRKPAFLSGEQKKAIVDLLFKTNRKVTVKQLKEDYFKKIECFDSVEISGVEDRFNASLGTYHDLLKIIKDKDFLDNEENEDILEDIVLTLTLFEDREMIEERLKTYAHLFDDKVMKQLKRRRYTGWGRLSRKLINGIRDKQSGKTILDFLKSDGFANRNFMQLIHDDSLTFKEDIQKAQVSGQGDSLHEHIANLAGSPAIKKGILQTVKVVDELVKVMGRHKPENIVIEMARENQTTQKGQKNSRERMKRIEEGIKELGSQILKEHPVENTQLQNEKLYLYYLQNGRDMYVDQELDINRLSDYDVDHIVPQSFLKDDSIDNKVLTRSDKNRGKSDNVPSEEVVKKMKNYWRQLLNAKLITQRKFDNLTKAERGGLSELDKAGFIKRQLVETRQITKHVAQILDSRMNTKYDENDKLIREVKVITLKSKLVSDFRKDFQFYKVREINNYHHAHDAYLNAVVGTALIKKYPKLESEFVYGDYKVYDVRKMIAKSEQEIGKATAKYFFYSNIMNFFKTEITLANGEIRKRPLIETNGETGEIVWDKGRDFATVRKVLSMPQVNIVKKTEVQTGGFSKESILPKRNSDKLIARKKDWDPKKYGGFDSPTVAYSVLVVAKVEKGKSKKLKSVKELLGITIMERSSFEKNPIDFLEAKGYKEVKKDLIIKLPKYSLFELENGRKRMLASAGELQKGNELALPSKYVNFLYLASHYEKLKGSPEDNEQKQLFVEQHKHYLDEIIEQISEFSKRVILADANLDKVLSAYNKHRDKPIREQAENIIHLFTLTNLGAPAAFKYFDTTIDRKRYTSTKEVLDATLIHQSITGLYETRIDLSQLGGDSRADPKKKRKV

SEQ ID NO: 3167 - protein, 1399 aa, Artificial Sequence; identical to SEQ ID NO: 3163
  Description of Artificial Sequence: Synthetic polypeptide

SEQ ID NO: 3168 - protein, 1393 aa, Artificial Sequence
  Description of Artificial Sequence: Synthetic polypeptide
MAPKKKRKVDKKYSIGLDIGTNSVGWAVITDEYKVPSKKFKVLGNTDRHSIKKNLIGALLFDSGETAEATRLKRTARRRYTRRKNRICYLQEIFSNEMAKVDDSFFHRLEESFLVEEDKKHERHPIFGNIVDEVAYHEKYPTIYHLRKKLVDSTDKADLRLIYLALAHMIKFRGHFLIEGDLNPDNSDVDKLFIQLVQTYNQLFEENPINASGVDAKAILSARLSKSRRLENLIAQLPGEKKNGLFGNLIALSLGLTPNFKSNFDLAEDAKLQLSKDTYDDDLDNLLAQIGDQYADLFLAAKNLSDAILLSDILRVNTEITKAPLSASMIKRYDEHHQDLTLLKALVRQQLPEKYKEIFFDQSKNGYAGYIDGGASQEEFYKFIKPILEKMDGTEELLVKLNREDLLRKQRTFDNGSIPHQIHLGELHAILRRQEDFYPFLKDNREKIEKILTFRIPYYVGPLARGNSRFAWMTRKSEETITPWNFEEVVDKGASAQSFIERMTNFDKNLPNEKVLPKHSLLYEYFTVYNELTKVKYVTEGMRKPAFLSGEQKKAIVDLLFKTNRKVTVKQLKEDYFKKIECFDSVEISGVEDRFNASLGTYHDLLKIIKDKDFLDNEENEDILEDIVLTLTLFEDREMIEERLKTYAHLFDDKVMKQLKRRRYTGWGRLSRKLINGIRDKQSGKTILDFLKSDGFANRNFMQLIHDDSLTFKEDIQKAQVSGQGDSLHEHIANLAGSPAIKKGILQTVKVVDELVKVMGRHKPENIVIEMARENQTTQKGQKNSRERMKRIEEGIKELGSQILKEHPVENTQLQNEKLYLYYLQNGRDMYVDQELDINRLSDYDVDHIVPQSFLKDDSIDNAVLTRSDKNRGKSDNVPSEEVVKKMKNYWRQLLNAKLITQRKFDNLTKAERGGLSELDKAGFIKRQLVETRQITKHVAQILDSRMNTKYDENDKLIREVKVITLKSKLVSDFRKDFQFYKVREINNYHHAHDAYLNAVVGTALIKKYPKLESEFVYGDYKVYDVRKMIAKSEQEIGKATAKYFFYSNIMNFFKTEITLANGEIRKRPLIETNGETGEIVWDKGRDFATVRKVLSMPQVNIVKKTEVQTGGFSKESILPKRNSDKLIARKKDWDPKKYGGFDSPTVAYSVLVVAKVEKGKSKKLKSVKELLGITIMERSSFEKNPIDFLEAKGYKEVKKDLIIKLPKYSLFELENGRKRMLASAGELQKGNELALPSKYVNFLYLASHYEKLKGSPEDNEQKQLFVEQHKHYLDEIIEQISEFSKRVILADANLDKVLSAYNKHRDKPIREQAENIIHLFTLTNLGAPAAFKYFDTTIDRKRYTSTKEVLDATLIHQSITGLYETRIDLSQLGGDSRADPKKKRKVHHHHHH

SEQ ID NO: 3169 - protein, 1393 aa, Artificial Sequence
  Description of Artificial Sequence: Synthetic polypeptide
MAPKKKRKVDKKYSIGLDIGTNSVGWAVITDEYKVPSKKFKVLGNTDRHSIKKNLIGALLFDSGETAEATRLKRTARRRYTRRKNRICYLQEIFSNEMAKVDDSFFHRLEESFLVEEDKKHERHPIFGNIVDEVAYHEKYPTIYHLRKKLVDSTDKADLRLIYLALAHMIKFRGHFLIEGDLNPDNSDVDKLFIQLVQTYNQLFEENPINASGVDAKAILSARLSKSRRLENLIAQLPGEKKNGLFGNLIALSLGLTPNFKSNFDLAEDAKLQLSKDTYDDDLDNLLAQIGDQYADLFLAAKNLSDAILLSDILRVNTEITKAPLSASMIKRYDEHHQDLTLLKALVRQQLPEKYKEIFFDQSKNGYAGYIDGGASQEEFYKFIKPILEKMDGTEELLVKLNREDLLRKQRTFDNGSIPHQIHLGELHAILRRQEDFYPFLKDNREKIEKILTFRIPYYVGPLARGNSRFAWMTRKSEETITPWNFEEVVDKGASAQSFIERMTNFDKNLPNEKVLPKHSLLYEYFTVYNELTKVKYVTEGMRKPAFLSGEQKKAIVDLLFKTNRKVTVKQLKEDYFKKIECFDSVEISGVEDRFNASLGTYHDLLKIIKDKDFLDNEENEDILEDIVLTLTLFEDREMIEERLKTYAHLFDDKVMKQLKRRRYTGWGRLSRKLINGIRDKQSGKTILDFLKSDGFANRNFMQLIHDDSLTFKEDIQKAQVSGQGDSLHEHIANLAGSPAIKKGILQTVKVVDELVKVMGRHKPENIVIEMARENQTTQKGQKNSRERMKRIEEGIKELGSQILKEHPVENTQLQNEALYLYYLQNGRDMYVDQELDINRLSDYDVDHIVPQSFLKDDSIDNKVLTRSDKNRGKSDNVPSEEVVKKMKNYWRQLLNAKLITQRKFDNLTKAERGGLSELDKAGFIKRQLVETRQITKHVAQILDSRMNTKYDENDKLIREVKVITLKSKLVSDFRKDFQFYKVREINNYHHAHDAYLNAVVGTALIKKYPALESEFVYGDYKVYDVRKMIAKSEQEIGKATAKYFFYSNIMNFFKTEITLANGEIRKAPLIETNGETGEIVWDKGRDFATVRKVLSMPQVNIVKKTEVQTGGFSKESILPKRNSDKLIARKKDWDPKKYGGFDSPTVAYSVLVVAKVEKGKSKKLKSVKELLGITIMERSSFEKNPIDFLEAKGYKEVKKDLIIKLPKYSLFELENGRKRMLASAGELQKGNELALPSKYVNFLYLASHYEKLKGSPEDNEQKQLFVEQHKHYLDEIIEQISEFSKRVILADANLDKVLSAYNKHRDKPIREQAENIIHLFTLTNLGAPAAFKYFDTTIDRKRYTSTKEVLDATLIHQSITGLYETRIDLSQLGGDSRADPKKKRKVHHHHHH

SEQ ID NO: 3170 - protein, 1393 aa, Artificial Sequence
  Description of Artificial Sequence: Synthetic polypeptide
MAPKKKRKVDKKYSIGLDIGTNSVGWAVITDEYKVPSKKFKVLGNTDRHSIKKNLIGALLFDSGETAEATRLKRTARRRYTRRKNRICYLQEIFSNEMAKVDDSFFHRLEESFLVEEDKKHERHPIFGNIVDEVAYHEKYPTIYHLRKKLVDSTDKADLRLIYLALAHMIKFRGHFLIEGDLNPDNSDVDKLFIQLVQTYNQLFEENPINASGVDAKAILSARLSKSRRLENLIAQLPGEKKNGLFGNLIALSLGLTPNFKSNFDLAEDAKLQLSKDTYDDDLDNLLAQIGDQYADLFLAAKNLSDAILLSDILRVNTEITKAPLSASMIKRYDEHHQDLTLLKALVRQQLPEKYKEIFFDQSKNGYAGYIDGGASQEEFYKFIKPILEKMDGTEELLVKLNREDLLRKQRTFDNGSIPHQIHLGELHAILRRQEDFYPFLKDNREKIEKILTFRIPYYVGPLARGNSRFAWMTRKSEETITPWNFEEVVDKGASAQSFIERMTNFDKNLPNEKVLPKHSLLYEYFTVYNELTKVKYVTEGMRKPAFLSGEQKKAIVDLLFKTNRKVTVKQLKEDYFKKIECFDSVEISGVEDRFNASLGTYHDLLKIIKDKDFLDNEENEDILEDIVLTLTLFEDREMIEERLKTYAHLFDDKVMKQLKRRRYTGWGRLSRKLINGIRDKQSGKTILDFLKSDGFANRNFMQLIHDDSLTFKEDIQKAQVSGQGDSLHEHIANLAGSPAIKKGILQTVKVVDELVKVMGRHKPENIVIEMARENQTTQKGQKNSRERMKRIEEGIKELGSQILKEHPVENTQLQNEKLYLYYLQNGRDMYVDQELDINRLSDYDVDHIVPQSFLADDSIDNKVLTRSDKNRGKSDNVPSEEVVKKMKNYWRQLLNAKLITQRKFDNLTKAERGGLSELDKAGFIKRQLVETRQITKHVAQILDSRMNTKYDENDKLIREVKVITLKSKLVSDFRKDFQFYKVREINNYHHAHDAYLNAVVGTALIKKYPALESEFVYGDYKVYDVRKMIAKSEQEIGKATAKYFFYSNIMNFFKTEITLANGEIRKAPLIETNGETGEIVWDKGRDFATVRKVLSMPQVNIVKKTEVQTGGFSKESILPKRNSDKLIARKKDWDPKKYGGFDSPTVAYSVLVVAKVEKGKSKKLKSVKELLGITIMERSSFEKNPIDFLEAKGYKEVKKDLIIKLPKYSLFELENGRKRMLASAGELQKGNELALPSKYVNFLYLASHYEKLKGSPEDNEQKQLFVEQHKHYLDEIIEQISEFSKRVILADANLDKVLSAYNKHRDKPIREQAENIIHLFTLTNLGAPAAFKYFDTTIDRKRYTSTKEVLDATLIHQSITGLYETRIDLSQLGGDSRADPKKKRKVHHHHHH

SEQ ID NO: 3171 - protein, 1393 aa, Artificial Sequence
  Description of Artificial Sequence: Synthetic polypeptide
MAPKKKRKVDKKYSIGLDIGTNSVGWAVITDEYKVPSKKFKVLGNTDRHSIKKNLIGALLFDSGETAEATRLKRTARRRYTRRKNRICYLQEIFSNEMAKVDDSFFHRLEESFLVEEDKKHERHPIFGNIVDEVAYHEKYPTIYHLRKKLVDSTDKADLRLIYLALAHMIKFRGHFLIEGDLNPDNSDVDKLFIQLVQTYNQLFEENPINASGVDAKAILSARLSKSRRLENLIAQLPGEKKNGLFGNLIALSLGLTPNFKSNFDLAEDAKLQLSKDTYDDDLDNLLAQIGDQYADLFLAAKNLSDAILLSDILRVNTEITKAPLSASMIKRYDEHHQDLTLLKALVRQQLPEKYKEIFFDQSKNGYAGYIDGGASQEEFYKFIKPILEKMDGTEELLVKLNREDLLRKQRTFDNGSIPHQIHLGELHAILRRQEDFYPFLKDNREKIEKILTFRIPYYVGPLARGNSRFAWMTRKSEETITPWNFEEVVDKGASAQSFIERMTAFDKNLPNEKVLPKHSLLYEYFTVYNELTKVKYVTEGMRKPAFLSGEQKKAIVDLLFKTNRKVTVKQLKEDYFKKIECFDSVEISGVEDRFNASLGTYHDLLKIIKDKDFLDNEENEDILEDIVLTLTLFEDREMIEERLKTYAHLFDDKVMKQLKRRRYTGWGALSRKLINGIRDKQSGKTILDFLKSDGFANRNFMALIHDDSLTFKEDIQKAQVSGQGDSLHEHIANLAGSPAIKKGILQTVKVVDELVKVMGRHKPENIVIEMARENQTTQKGQKNSRERMKRIEEGIKELGSQILKEHPVENTQLQNEKLYLYYLQNGRDMYVDQELDINRLSDYDVDHIVPQSFLKDDSIDNKVLTRSDKNRGKSDNVPSEEVVKKMKNYWRQLLNAKLITQRKFDNLTKAERGGLSELDKAGFIKRQLVETRAITKHVAQILDSRMNTKYDENDKLIREVKVITLKSKLVSDFRKDFQFYKVREINNYHHAHDAYLNAVVGTALIKKYPKLESEFVYGDYKVYDVRKMIAKSEQEIGKATAKYFFYSNIMNFFKTEITLANGEIRKRPLIETNGETGEIVWDKGRDFATVRKVLSMPQVNIVKKTEVQTGGFSKESILPKRNSDKLIARKKDWDPKKYGGFDSPTVAYSVLVVAKVEKGKSKKLKSVKELLGITIMERSSFEKNPIDFLEAKGYKEVKKDLIIKLPKYSLFELENGRKRMLASAGELQKGNELALPSKYVNFLYLASHYEKLKGSPEDNEQKQLFVEQHKHYLDEIIEQISEFSKRVILADANLDKVLSAYNKHRDKPIREQAENIIHLFTLTNLGAPAAFKYFDTTIDRKRYTSTKEVLDATLIHQSITGLYETRIDLSQLGGDSRADPKKKRKVHHHHHH

SEQ ID NO: 3172 - protein, 1386 aa, Artificial Sequence
  Description of Artificial Sequence: Synthetic polypeptide
MAPKKKRKVDKKYSIGLDIGTNSVGWAVITDEYKVPSKKFKVLGNTDRHSIKKNLIGALLFDSGETAEATRLKRTARRRYTRRKNRILYLQEIFSNEMAKVDDSFFHRLEESFLVEEDKKHERHPIFGNIVDEVAYHEKYPTIYHLRKKLVDSTDKADLRLIYLALAHMIKFRGHFLIEGDLNPDNSDVDKLFIQLVQTYNQLFEENPINASGVDAKAILSARLSKSRRLENLIAQLPGEKKNGLFGNLIALSLGLTPNFKSNFDLAEDAKLQLSKDTYDDDLDNLLAQIGDQYADLFLAAKNLSDAILLSDILRVNTEITKAPLSASMIKRYDEHHQDLTLLKALVRQQLPEKYKEIFFDQSKNGYAGYIDGGASQEEFYKFIKPILEKMDGTEELLVKLNREDLLRKQRTFDNGSIPHQIHLGELHAILRRQEDFYPFLKDNREKIEKILTFRIPYYVGPLARGNSRFAWMTRKSEETITPWNFEEVVDKGASAQSFIERMTNFDKNLPNEKVLPKHSLLYEYFTVYNELTKVKYVTEGMRKPAFLSGEQKKAIVDLLFKTNRKVTVKQLKEDYFKKIEEFDSVEISGVEDRFNASLGTYHDLLKIIKDKDFLDNEENEDILEDIVLTLTLFEDREMIEERLKTYAHLFDDKVMKQLKRRRYTGWGRLSRKLINGIRDKQSGKTILDFLKSDGFANRNFMQLIHDDSLTFKEDIQKAQVSGQGDSLHEHIANLAGSPAIKKGILQTVKVVDELVKVMGRHKPENIVIEMARENQTTQKGQKNSRERMKRIEEGIKELGSQILKEHPVENTQLQNEKLYLYYLQNGRDMYVDQELDINRLSDYDVDHIVPQSFLKDDSIDNKVLTRSDKNRGKSDNVPSEEVVKKMKNYWRQLLNAKLITQRKFDNLTKAERGGLSELDKAGFIKRQLVETRQITKHVAQILDSRMNTKYDENDKLIREVKVITLKSKLVSDFRKDFQFYKVREINNYHHAHDAYLNAVVGTALIKKYPKLESEFVYGDYKVYDVRKMIAKSEQEIGKATAKYFFYSNIMNFFKTEITLANGEIRKRPLIETNGETGEIVWDKGRDFATVRKVLSMPQVNIVKKTEVQTGGFSKESILPKRNSDKLIARKKDWDPKKYGGFDSPTVAYSVLVVAKVEKGKSKKLKSVKELLGITIMERSSFEKNPIDFLEAKGYKEVKKDLIIKLPKYSLFELENGRKRMLASAGELQKGNELALPSKYVNFLYLASHYEKLKGSPEDNEQKQLFVEQHKHYLDEIIEQISEFSKRVILADANLDKVLSAYNKHRDKPIREQAENIIHLFTLTNLGAPAAFKYFDTTIDRKRYTSTKEVLDATLIHQSITGLYETRIDLSQLGGDSRADHHHHHH

SEQ ID NO: 3173 - skipped

SEQ ID NO: 3174 - RNA, 74 nt, Artificial Sequence; identical to SEQ ID NO: 3109
  Description of Artificial Sequence: Synthetic oligonucleotide

SEQ ID NO: 3175 - protein, 6 aa, Artificial Sequence
  Description of Artificial Sequence: Synthetic 6xHis tag
HHHHHH

SEQ ID NO: 3176 - protein, 8 aa, Artificial Sequence
  Description of Artificial Sequence: Synthetic peptide
HHHHHHHH

SEQ ID NO: 3177 - RNA, 10 nt, Artificial Sequence
  Description of Artificial Sequence: Synthetic oligonucleotide
  misc_feature (1)..(10): This sequence may encompass 1-10 nucleotides
uuuuuuuuuu

SEQ ID NO: 3178 - RNA, 10 nt, Artificial Sequence
  Description of Artificial Sequence: Synthetic oligonucleotide
  misc_feature (1)..(10): This sequence may encompass 1-10 nucleotides
aaaaaaaaaa

SEQ ID NO: 3179 - RNA, 36 nt, Artificial Sequence
  Description of Artificial Sequence: Synthetic oligonucleotide
  modified_base (1)..(20): a, c, u, g, unknown or other
nnnnnnnnnnnnnnnnnnnnguuuuagagcuaugcu

SEQ ID NO: 3180 - RNA, 42 nt, Artificial Sequence
  Description of Artificial Sequence: Synthetic oligonucleotide
  modified_base (1)..(20): a, c, u, g, unknown or other
nnnnnnnnnnnnnnnnnnnnguuuuagagcuaugcuguuuug

SEQ ID NO: 3181 - RNA, 42 nt, Artificial Sequence; identical to SEQ ID NO: 3180
  Description of Artificial Sequence: Synthetic oligonucleotide
  modified_base (1)..(20): a, c, u, g, unknown or other

SEQ ID NO: 3182 - RNA, 100 nt, Artificial Sequence
  Description of Artificial Sequence: Synthetic polynucleotide
  modified_base (1)..(20): a, c, u, g, unknown or other
nnnnnnnnnnnnnnnnnnnnguuuuagagcuagaaauagcaaguuaaaauaaggcuaguccguuaucaacuugaaaaaguggcaccgagucggugcuuuu

SEQ ID NO: 3183 - RNA, 100 nt, Artificial Sequence; identical to SEQ ID NO: 3182
  Description of Artificial Sequence: Synthetic polynucleotide
  modified_base (1)..(20): a, c, u, g, unknown or other

SEQ ID NO: 3184 - RNA, 100 nt, Artificial Sequence; identical to SEQ ID NO: 3182
  Description of Artificial Sequence: Synthetic polynucleotide
  modified_base (1)..(20): a, c, u, g, unknown or other

SEQ ID NO: 3185 - DNA, 22 bp, Artificial Sequence
  Description of Artificial Sequence: Synthetic primer
ttaaggaatgctaaactgggga

SEQ ID NO: 3186 - DNA, 22 bp, Artificial Sequence
  Description of Artificial Sequence: Synthetic primer
gcttcggccattagtagagaaa

SEQ ID NO: 3187 - DNA, 22 bp, Artificial Sequence
  Description of Artificial Sequence: Synthetic primer
atgcttcagggaatagggaaat

SEQ ID NO: 3188 - DNA, 22 bp, Artificial Sequence
  Description of Artificial Sequence: Synthetic primer
cacctggccaagctactttaat
